(19) United States
(12) Patent Application Publication
(10) Pub. No.: US 2024/0011032 A1
(43) Pub. Date: Jan. 11, 2024

(54) SNCA IRNA COMPOSITIONS AND METHODS OF USE THEREOF FOR TREATING OR PREVENTING SNCA-ASSOCIATED NEURODEGENERATIVE DISEASES

(71) Applicant: Alnylam Pharmaceuticals, Inc, Cambridge, MA (US)

(72) Inventors: Mangala Meenakshi Soundarapandian, Cambridge, MA (US); Lan Thi Hoang Dang, Cambridge, MA (US); James D. Mclninch, Cambridge, MA (US); Mark K. Schlegel, Cambridge, MA (US); Adam Castoreno, Cambridge, MA (US); Charalambos Kaittanis, Cambridge, MA (US)

(21) Appl. No.: 18/247,314

(22) PCT Filed: Sep. 29, 2021
(86) PCT No.: PCT/US2021/052580

§ 371 Date: Mar. 30, 2023

Related U.S. Application Data
(60) Provisional application No. 63/086,495, filed on Oct. 1, 2020.

(51) Int. Cl. C12N 15/113; A61K 47/54

(52) U.S. Cl. CPC C12N 15/113; A61K 47/549; C12N 2310/14; C12N 2310/321; C12N 2310/332; C12N 2310/3231; C12N 2310/315

(57) ABSTRACT

The disclosure relates to double stranded ribonucleic acid (dsRNAi) agents and compositions targeting a SNCA gene, as well as methods of inhibiting expression of a SNCA gene and methods of treating subjects having a SNCA-associated neurodegenerative disease or disorder, e.g., Parkinson's Disease (PD), multiple system atrophy, Lewy body dementia (LBD), among other synucleinopathies, using such dsRNAi agents and compositions.

### CROSS-REFERENCE TO RELATED APPLICATION

[0001] The present application is related to and claims priority under 35 U.S.C. § 119(e) to U.S. provisional patent application No. 63/086,495, entitled “SNCA iRNA Compositions and Methods of Use Thereof for Treating or Preventing SNCA-Associated Neurodegenerative Diseases,” filed Oct. 1, 2020. The entire content of the aforementioned patent application is incorporated herein by this reference.

### FIELD OF THE INVENTION

[0002] The instant disclosure relates generally to SNCA-targeting RNAi agents and methods.

### SEQUENCE LISTING

[0003] The instant application contains a Sequence Listing which has been filed electronically in ASCII format and is hereby incorporated by reference in its entirety. Said ASCII copy, created on Sep. 28, 2021, is named BN00007_0161_ALN_364WO_SL.txt and is 687 KB in size.

### BACKGROUND OF THE INVENTION

[0004] The SNCA gene encodes a presynaptic neuronal protein, α-synuclein (also referred to as alpha-synuclein or synuclein-alpha herein), and has been linked genetically and neuropathologically to Parkinson's disease (PD) (Stefanis, L. Cold Spring Harb Perspect Med. 2: a009399). α-Synuclein is viewed to contribute to PD pathogenesis in a number of ways, but it is generally believed that aberrant soluble oligomeric conformations of α-synuclein, termed protofibrils, are the toxic species that mediate disruption of cellular homeostasis and neuronal death, through effects on various intracellular targets, including synaptic function. Furthermore, secreted α-synuclein is believed to exert deleterious effects on neighboring cells, including seeding of aggregation, thus possibly contributing to disease propagation. Although the extent to which α-synuclein is involved in all cases of PD is not clear, targeting the toxic functions conferred by this protein when it is dysregulated presents a potentially valuable therapeutic strategy, not only for PD, but also for other neurodegenerative conditions, termed synucleinopathies, which all exhibit common neuropathological hallmarks as a result of alpha-synuclein accumulation, referred to as Lewy bodies (LBs) and Lewy neurites (LNs). In addition to PD, such documented or suspected SNCA-related synucleinopathies include, without limitation, multiple system atrophy, Lewy body dementia (LBD), pure autonomic failure (PAF), Pick's disease, progressive supranuclear palsy, dementia pugilistica, parkinsonism linked to chromosome 17, Lytico-Bodig disease, tangle predominant dementia, Argyrophilic grain disease, ganglioglioma, gangliocytoma, meningioangiomatosis, subacute sclerosing panencephalitis, lead encephalopathy, tuberous sclerosis, Hallervorden-Spatz disease, lipofuscinosis, corticobasal degeneration, frontotemporal dementia, frontotemporal lobar degeneration, Alzheimer's disease, Huntington's disease, Down's syndrome, psychosis, schizophrenia and Creutzfeldt-Jakob disease.

[0005] PD and LBD are the two most prevalent examples of neurodegenerative disorders with SNCA brain pathology. PD is the most common movement disorder and is characterized by rigidity, hypokinesia, tremor and postural instability. PD is believed to affect approximately four to six million people worldwide. LBD represents 5-15% of all dementia. In addition to forgetfulness and other dementing symptoms that often fluctuate, LBD patients typically suffer from recurrent falls and visual hallucinations.

[0006] Apart from the neuropathological changes observed in α-synucleinopathies, levels of α-synuclein protein are generally increased in affected brain regions (Klucken et al., 2006).

[0007] α-Synuclein monomers, tetramers and fibrillar aggregates are a major component of Lewy body (LB)-like intraneuronal inclusions, glial inclusions and axonal spheroids in neurodegeneration with brain iron accumulation. Lewy-related pathology (LRP), primarily comprised of α-synuclein, is present in a majority of Alzheimer's autopsies, and higher levels of α-synuclein in patients have been linked to cognitive decline (Twohig et al. (2019) Molecular Neurodegeneration). Autosomal dominant mutations in the SNCA gene including, among others, A53T, A30P, E46K, and H50Q (Zarranz et al. (2004) Ann. Neurol. 55,164-173, Choi et al. (2004) FEBS Lett. 576, 363-368, and Tsigelny et al. (2015) ACS Chem. Neurosci. 6, 403-416), A53T (Polymeropoulos et al. (1997) Science), as well as triplications and duplications, have been identified to run in families afflicted with associated neurodegenerative diseases. The preceding indicates that not only pathogenic mutations in SNCA, but also increases in alpha-synuclein protein, impact disease outcome.

[0008] The role of SNCA mutations in disease onset is not well understood, however evidence points to a toxic gain-of-function inherent in the normal α-synuclein protein when it exceeds a certain level (Stefanis et al. (2012) Cold Spring Harb Perspect Med.) and/or interacts aberrantly with cellular lipids and vesicles (reviewed in Kiechler et al. (2020) Front. Cell Dev. Biol). In apparent agreement with this, SNCA null mice, in contrast to transgenic over-expressors, displayed no overt neuropathological or behavioral phenotype (Abeliovich et al. (2000) Neuron). Posttranscriptional regulation of SNCA was also shown to occur through endogenous micro RNAs, binding to the 3′ end of the gene (Junn et al. (2009) PNAS 106: 13052-13057; Doxakis (2010), JBC). Further, studies on the familial point mutations in SNCA demonstrated suppressed expression, especially in cases with prolonged disease onset (Markopoulou et al. (1999) Ann Neurol. 46(3):374-81 and Kobayashi et al. (2003) Brain 126(Pt 1):32-42). Similarly, Voutsinas et al. (2010) Hum Mutat. 31(6):685-91) found that over-expression of even wild-type SNCA messenger RNA (mRNA) was responsible for disease onset. These data indicate that suppression of total SNCA levels would lower α-synuclein-induced toxicity.

[0009] There are no disease modifying treatments for synucleinopathies, including PD, multiple system atrophy, and Lewy body dementia, and treatment options are limited, e.g., merely palliative. For example, at present, only symptomatic treatments are available for PD patients (by substituting the loss of active dopamine in the brain) and AD patients (i.e., cholinesterase inhibitors). None of the existing treatment strategies for α-synucleinopathies are directed against the underlying disease processes.

[0010] Thus, noting the described involvement of SNCA in several neurodegenerative disorders (synucleinopathies), there remains a need for an agent that can selectively and efficiently silence the SNCA gene (e.g., eliminating or reducing the effect of toxic α-synuclein species) using the cell's own RNAi machinery that has both high biological activity and in vivo stability, and that can effectively inhibit expression of a target SNCA gene.

### BRIEF SUMMARY OF THE INVENTION

[0011] The present disclosure provides RNAi agent compositions which affect the RNA-induced silencing complex (RISC)-mediated cleavage of RNA transcripts of a Synuclein alpha (SNCA) gene. The SNCA gene may be within a cell, e.g., a cell within a subject, such as a human. The present disclosure also provides methods of using the RNAi agent compositions of the disclosure for inhibiting the expression of a SNCA gene or for treating a subject who would benefit from inhibiting or reducing the expression of a SNCA gene, e.g., a subject suffering or prone to suffering from a SNCA-associated neurodegenerative disease or disorder, e.g., PD, multiple system atrophy, Lewy body dementia (LBD), pure autonomic failure (PAF), Pick's disease, progressive supranuclear palsy, dementia pugilistica, parkinsonism linked to chromosome 17, Lytico-Bodig disease, tangle predominant dementia, Argyrophilic grain disease, ganglioglioma, gangliocytoma, meningioangiomatosis, subacute sclerosing panencephalitis, lead encephalopathy, tuberous sclerosis, Hallervorden-Spatz disease, lipofuscinosis, corticobasal degeneration, frontotemporal dementia, frontotemporal lobar degeneration, Alzheimer's disease and Huntington's disease.

[0012] Accordingly, in one aspect, the instant disclosure provides a double stranded ribonucleic acid (RNAi) agent for inhibiting expression of SNCA, where the dsRNA agent includes a sense strand and an antisense strand forming a double stranded region, where the sense strand harbors a nucleotide sequence including at least 15 contiguous nucleotides, with 0 or 1 mismatches, of a portion of the nucleotide sequence of SEQ ID NO: 1, or a nucleotide sequence having at least 90% nucleotide sequence identity to a portion of the nucleotide sequence of SEQ ID NO: 1, and the antisense strand harbors a nucleotide sequence including at least 15 contiguous nucleotides, with 0 or 1 mismatches, of the corresponding portion of the nucleotide sequence of SEQ ID NO: 2, or a nucleotide sequence having at least 90% nucleotide sequence identity to a portion of the nucleotide sequence of SEQ ID NO: 2.

[0013] In another aspect, the instant disclosure provides a double stranded ribonucleic acid (RNAi) agent for inhibiting expression of a SNCA gene, where the RNAi agent includes a sense strand and an antisense strand, and where the antisense strand includes a region of complementarity which includes at least 15 contiguous nucleotides differing by no more than 3 nucleotides (i.e., differing by 3, 2, 1, or 0 nucleotides) from any one of the antisense sequences listed in Tables 2, 3, 12 or 13.

[0014] Optionally, the sense strand or the antisense strand is conjugated to one or more lipophilic moieties.

[0015] In certain embodiments, the sense strand harbors a nucleotide sequence including at least 17 contiguous nucleotides, with 0 or 1 mismatches, of a portion of the nucleotide sequence of SEQ ID NO: 1, and the antisense strand harbors a nucleotide sequence including at least 17 contiguous nucleotides, with 0 or 1 mismatches, of the corresponding portion of the nucleotide sequence of SEQ ID NO: 2, such that the sense strand is complementary to the at least 17 contiguous nucleotides in the antisense strand.

[0016] In some embodiments, the sense strand harbors a nucleotide sequence including at least 19 contiguous nucleotides, with 0 or 1 mismatches, of a portion of the nucleotide sequence of SEQ ID NO: 1, and the antisense strand harbors a nucleotide sequence including at least 19 contiguous nucleotides, with 0 or 1 mismatches, of the corresponding portion of the nucleotide sequence of SEQ ID NO: 2, such that the sense strand is complementary to the at least 19 contiguous nucleotides in the antisense strand.

[0017] In embodiments, the sense strand harbors a nucleotide sequence including at least 21 contiguous nucleotides, with 0 or 1 mismatches, of a portion of the nucleotide sequence of SEQ ID NO: 1, and the antisense strand harbors a nucleotide sequence including at least 21 contiguous nucleotides, with 0 or 1 mismatches, of the corresponding portion of the nucleotide sequence of SEQ ID NO: 2, such that the sense strand is complementary to the at least 21 contiguous nucleotides in the antisense strand.

[0018] In certain embodiments, the antisense strand includes a region of complementarity which includes at least 15 contiguous nucleotides of any one of the antisense sequences listed in Tables 2, 3, 12 or 13. In certain embodiments, the antisense strand includes a region of complementarity which includes at least 19 contiguous nucleotides differing by no more than 3 nucleotides (i.e., differing by 3, 2, 1, or 0 nucleotides) from any one of the antisense sequences listed in Tables 2, 3, 12 or 13. In certain embodiments, the antisense strand includes a region of complementarity which includes at least 19 contiguous nucleotides of any one of the antisense sequences listed in Tables 2, 3, 12 or 13. In certain embodiments, thymine-to-uracil or uracil-to-thymine differences between aligned (compared) sequences are not counted as nucleotides that differ between the aligned (compared) sequences.

[0019] In some embodiments, the agents include one or more lipophilic moieties conjugated to one or more nucleotide positions (optionally internal nucleotide positions), optionally via a linker or carrier. In certain embodiments, the lipophilic moiety is conjugated to one or more positions in the double stranded region of the dsRNA agent. Optionally, the one or more lipophilic moieties are conjugated to at least the sense strand. In certain embodiments, the one or more lipophilic moieties are conjugated to at least the antisense strand. In embodiments, the one or more lipophilic moieties are conjugated to both strands.

[0020] In embodiments, lipophilicity of the lipophilic moiety, measured by log Kow, exceeds 0.

[0021] In some embodiments, the hydrophobicity of the double-stranded RNAi agent, measured by the unbound fraction in a plasma protein binding assay of the double-stranded RNAi agent, exceeds 0.2. Optionally, the plasma protein binding assay is an electrophoretic mobility shift assay using human serum albumin protein.

[0022] Another aspect of the instant disclosure provides a double stranded RNAi agent for inhibiting expression of a SNCA gene, where the dsRNA agent includes a sense strand and an antisense strand, where the sense strand includes at least 15 contiguous nucleotides differing by no more than 3 nucleotides (i.e., differing by 3, 2, 1, or 0 nucleotides) from any one of the sense strand sequences presented in Tables 2, 3, 12 or 13; and where the antisense strand includes at least 15 contiguous nucleotides differing by no more than 3 nucleotides from any one of antisense strand nucleotide sequences presented in Tables 2, 3, 12 or 13. In certain embodiments, the sense strand includes at least 15 contiguous nucleotides of any one of the sense strand sequences presented in Tables 2, 3, 12 or 13; and where the antisense strand includes at least 15 contiguous nucleotides of any one of antisense strand nucleotide sequences presented in Tables 2, 3, 12 or 13. In certain embodiments, the sense strand includes at least 19 contiguous nucleotides of any one of the sense strand sequences presented in Tables 2, 3, 12 or 13; and where the antisense strand includes at least 19 contiguous nucleotides of any one of antisense strand nucleotide sequences presented in Tables 2, 3, 12 or 13 (i.e., differing by 3, 2, 1, or 0 nucleotides) from any one of antisense strand nucleotide sequences presented in Tables 2, 3, 12 or 13.

[0023] An additional aspect of the disclosure provides a double stranded RNAi agent for inhibiting expression of a SNCA gene, where the dsRNA agent includes a sense strand and an antisense strand, where the sense strand includes at least 15 contiguous nucleotides differing by no more than 3 nucleotides (i.e., differing by 3, 2, 1, or 0 nucleotides) from any one of the nucleotide sequences of SEQ ID NOs: 1, 3, 5, or 7, or a nucleotide sequence having at least 90% nucleotide sequence identity, e.g. 90, 91, 92, 93, 94, 95, 96, 97, 98, 99 or 100% identity, to the entire nucleotide sequence of any one of SEQ ID NOs: 1, 3, 5, or 7, where a substitution of a uracil for any thymine of SEQ ID NOs: 1, 3, 5, or 7 (when comparing aligned sequences) does not count as a difference that contributes to the differing by no more than 3 nucleotides (i.e., differing by 3, 2, 1, or 0 nucleotides) from any one of the nucleotide sequences of SEQ ID NOs: 1, 3, 5, or 7, or the nucleotide sequence having at least 90% nucleotide sequence identity, e.g. 90, 91, 92, 93, 94, 95, 96, 97, 98, 99 or 100% identity, to the entire nucleotide sequence of any one of SEQ ID NOs: 1, 3, 5, or 7; and where the antisense strand includes at least 15 contiguous nucleotides differing by no more than 3 nucleotides from any one of the nucleotide sequences of SEQ ID NOs: 2, 4, 6, or 8, or a nucleotide sequence having at least 90% nucleotide sequence identity, e.g. 90, 91, 92, 93, 94, 95, 96, 97, 98, 99 or 100% identity, to the entire nucleotide sequence of any one of SEQ ID NOs: 2, 4, 6, or 8, where a substitution of a uracil for any thymine of SEQ ID NOs: 2, 4, 6, or 8 (when comparing aligned sequences) does not count as a difference that contributes to the differing by no more than 3 nucleotides from any one of the nucleotide sequences of SEQ ID NOs: 2, 4, 6, or 8, or the nucleotide sequence having at least 90% nucleotide sequence identity, e.g. 90, 91, 92, 93, 94, 95, 96, 97, 98, 99 or 100% identity, to the entire nucleotide sequence of any one of SEQ ID NOs: 2, 4, 6, or 8, where at least one of the sense strand and the antisense strand includes one or more lipophilic moieties conjugated to one or more internal nucleotide positions, optionally via a linker or carrier.

[0024] In one embodiment, the double stranded RNAi agent targeted to SNCA comprises a sense strand which includes at least 15 contiguous nucleotides differing by no more than 3 nucleotides (i.e., differing by 3, 2, 1, or 0 nucleotides) from the nucleotide sequence of the sense strand nucleotide sequence of a duplex in Tables 2, 3, 12 or 13.

[0025] In one embodiment, the double stranded RNAi agent targeted to SNCA comprises an antisense strand which includes at least 15 contiguous nucleotides differing by no more than 3 nucleotides (i.e., differing by 3, 2, 1, or 0 nucleotides) from the antisense nucleotide sequence of a duplex in one of Tables 2, 3, 12 or 13.

[0026] Optionally, the double stranded RNAi agent includes at least one modified nucleotide. In embodiments, no more than five of the sense strand nucleotides and no more than five of the nucleotides of the antisense strand are unmodified nucleotides.

[0027] In certain embodiments, substantially all of the nucleotides of the sense strand are modified nucleotides. Optionally, all of the nucleotides of the sense strand are modified nucleotides.

[0028] In some embodiments, substantially all of the nucleotides of the antisense strand are modified nucleotides. Optionally, all of the nucleotides of the antisense strand are modified nucleotides.

[0029] Optionally, all of the nucleotides of the sense strand and all of the nucleotides of the antisense strand are modified nucleotides.

[0030] In one embodiment, at least one of the modified nucleotides is a deoxy-nucleotide, a 3′-terminal deoxy-thymine (dT) nucleotide, a 2′-O-methyl modified nucleotide, a 2′-fluoro modified nucleotide, a 2′-deoxy-modified nucleotide, a locked nucleotide, an unlocked nucleotide, a conformationally restricted nucleotide, a constrained ethyl nucleotide, an abasic nucleotide, a 2′-amino-modified nucleotide, a 2′-O-allyl-modified nucleotide, 2′-C-alkyl-modified nucleotide, 2′-hydroxly-modified nucleotide, a 2′-methoxyethyl modified nucleotide, a 2′-O-alkyl-modified nucleotide, a morpholino nucleotide, a phosphoramidate, a non-natural base comprising nucleotide, a tetrahydropyran modified nucleotide, a 1,5-anhydrohexitol modified nucleotide, a cyclohexenyl modified nucleotide, a nucleotide comprising a 5′-phosphorothioate group, a nucleotide comprising a 5′-methylphosphonate group, a nucleotide comprising a 5′ phosphate or 5′ phosphate mimic, a nucleotide comprising vinyl phosphonate, a nucleotide comprising adenosine-glycol nucleic acid (GNA), a nucleotide comprising thymidine-glycol nucleic acid (GNA)S-Isomer, a nucleotide comprising 2-hydroxymethyl-tetrahydrofurane-5-phosphate, a nucleotide comprising 2′-deoxythymidine-3′phosphate, a nucleotide comprising 2′-deoxyguanosine-3′-phosphate, or a terminal nucleotide linked to a cholesteryl derivative or a dodecanoic acid bisdecylamide group.

[0031] In a related embodiment, the modified nucleotide is a 2′-deoxy-2′-fluoro modified nucleotide, a 2′-deoxy-modified nucleotide, 3′-terminal deoxy-thymine nucleotides (dT), a locked nucleotide, an abasic nucleotide, a 2′-amino-modified nucleotide, a 2′-alkyl-modified nucleotide, a morpholino nucleotide, a phosphoramidate, or a non-natural base comprising nucleotide.

[0032] In one embodiment, the modified nucleotide includes a short sequence of 3′-terminal deoxy-thymine nucleotides (dT).

[0033] In another embodiment, the modifications on the nucleotides are 2′-O-methyl, 2′fluoro and GNA modifications.

[0034] In an additional embodiment, the double stranded RNAi agent includes at least one phosphorothioate internucleotide linkage. Optionally, the double stranded RNAi agent includes 6-8 (e.g., 6, 7, or 8) phosphorothioate internucleotide linkages.

[0035] In certain embodiments, the region of complementarity is at least 17 nucleotides in length. Optionally, the region of complementarity is 19-23 nucleotides in length. Optionally, the region of complementarity is 19 nucleotides in length.

[0036] In one embodiment, each strand is no more than 30 nucleotides in length.

[0037] In another embodiment, at least one strand includes a 3′ overhang of at least 1 nucleotide. Optionally, at least one strand includes a 3′ overhang of at least 2 nucleotides.

[0038] In embodiments, the double stranded region is 15-30 nucleotide pairs in length.

[0039] Optionally, the double stranded region is 17-23 nucleotide pairs in length.

[0040] In some embodiments, the double stranded region is 17-25 nucleotide pairs in length.

[0041] In certain embodiments, the double stranded region is 23-27 nucleotide pairs in length.

[0042] In embodiments, the double stranded region is 19-21 nucleotide pairs in length.

[0043] In another embodiment, the double stranded region is 21-23 nucleotide pairs in length.

[0044] In embodiments, each strand has 19-30 nucleotides. Optionally, each strand has 19-23 nucleotides. In certain embodiments, each strand has 21-23 nucleotides.

[0045] In some embodiments, the double stranded RNAi agent further includes a lipophilic ligand, e.g., a C16 ligand, conjugated to the 3′ end of the sense strand through a monovalent or branched bivalent or trivalent linker.

[0046] In one embodiment, the ligand is

[chemical structure]

where B is a nucleotide base or a nucleotide base analog, optionally where B is adenine, guanine, cytosine, thymine or uracil.

[0047] In other embodiments, the agent further comprises a targeting ligand that targets a liver tissue, e.g., one or more GalNAc derivatives, optionally conjugated to the double stranded RNAi agent via a linker or carrier.

[0048] In yet other embodiments, the agents further comprise a lipophilic ligand, e.g., a C16 ligand, conjugated to the 3′ end of the sense strand through a monovalent or branched bivalent or trivalent linker and a targeting ligand that targets a liver tissue, e.g., one or more GalNAc derivatives conjugated to the 3′ end of the sense strand through a monovalent or branched bivalent or trivalent linker.

[0049] In another embodiment, the region of complementarity to SNCA includes any one of the antisense sequences in Tables 2, 3, 12 or 13.

[0050] In an additional embodiment, the region of complementarity to SNCA is that of any one of the antisense sequences in Tables 2, 3, 12 or 13. In some embodiments, the internal nucleotide positions include all positions except the terminal two positions from each end of the strand.

[0051] In a related embodiment, the internal positions include all positions except terminal three positions from each end of the strand. Optionally, the internal positions exclude the cleavage site region of the sense strand.

[0052] In some embodiments, the internal positions exclude positions 9-12, counting from the 5′-end of the sense strand. In certain embodiments, the sense strand is 21 nucleotides in length.

[0053] In other embodiments, the internal positions exclude positions 11-13, counting from the 3′-end of the sense strand. Optionally, the internal positions exclude the cleavage site region of the antisense strand. In certain embodiments, the sense strand is 21 nucleotides in length.

[0054] In some embodiments, the internal positions exclude positions 12-14, counting from the 5′-end of the antisense strand. In certain embodiments, the antisense strand is 23 nucleotides in length.

[0055] In another embodiment, the internal positions excluding positions 11-13 on the sense strand, counting from the 3′-end, and positions 12-14 on the antisense strand, counting from the 5′-end. In certain embodiments, the sense strand is 21 nucleotides in length and the antisense strand is 23 nucleotides in length.

[0056] In an additional embodiment, one or more lipophilic moieties are conjugated to one or more of the following internal positions: positions 4-8 and 13-18 on the sense strand, and positions 6-10 and 15-18 on the antisense strand, counting from the 5′end of each strand. Optionally, one or more lipophilic moieties are conjugated to one or more of the following internal positions: positions 5, 6, 7, 15, and 17 on the sense strand, and positions 15 and 17 on the antisense strand, counting from the 5′-end of each strand. In certain embodiments, the sense strand is 21 nucleotides in length and the antisense strand is 23 nucleotides in length.

[0057] Optionally, the lipophilic moiety is conjugated to position 21, position 20, position 15, position 1, position 7, position 6, or position 2 of the sense strand or position 16 of the antisense strand.

[0058] In certain embodiments, the lipophilic moiety is conjugated to position 21, position 20, position 15, position 1, or position 7 of the sense strand.

[0059] In embodiments, the lipophilic moiety is conjugated to position 21, position 20, or position 15 of the sense strand.

[0060] In some embodiments, the lipophilic moiety is conjugated to position 20 or position 15 of the sense strand.

[0061] In embodiments, the lipophilic moiety is conjugated to position 16 of the antisense strand.

[0062] In certain embodiments, the lipophilic moiety is an aliphatic, alicyclic, or polyalicyclic compound. Optionally, the lipophilic moiety is lipid, cholesterol, retinoic acid, cholic acid, adamantane acetic acid, 1-pyrene butyric acid, dihydrotestosterone, 1,3-bis-O(hexadecyl)glycerol, geranyloxyhexyanol, hexadecylglycerol, borneol, menthol, 1,3-propanediol, heptadecyl group, palmitic acid, myristic acid, 03-(oleoyl)lithocholic acid, 03-(oleoyl)cholenic acid, dimethoxytrityl, or phenoxazine.

[0063] In some embodiments, the lipophilic moiety contains a saturated or unsaturated C4-C30 hydrocarbon chain, and an optional functional group selected that is hydroxyl, amine, carboxylic acid, sulfonate, phosphate, thiol, azide, or alkyne.

[0064] In certain embodiments, the lipophilic moiety contains a saturated or unsaturated C6-Cis hydrocarbon chain. Optionally, the lipophilic moiety contains a saturated or unsaturated C16 hydrocarbon chain. In a related embodiment, the lipophilic moiety is conjugated via a carrier that replaces one or more nucleotide(s) in the internal position(s). In certain embodiments, the carrier is a cyclic group that is pyrrolidinyl, pyrazolinyl, pyrazolidinyl, imidazolinyl, imidazolidinyl, piperidinyl, piperazinyl, [1,3]dioxolanyl, oxazolidinyl, isoxazolidinyl, morpholinyl, thiazolidinyl, isothiazolidinyl, quinoxalinyl, pyridazinonyl, tetrahydrofuranyl, or decalinyl; or is an acyclic moiety based on a serinol backbone or a diethanolamine backbone.

[0065] In embodiments, the saturated or unsaturated C₁₆ hydrocarbon chain is conjugated to position 6, counting from the 5′-end of the strand.

[0066] In some embodiments, the lipophilic moiety is conjugated to the double-stranded RNAi agent via a linker containing an ether, thioether, urea, carbonate, amine, amide, maleimide-thioether, disulfide, phosphodiester, sulfonamide linkage, a product of a click reaction, or carbamate.

[0067] In one embodiment, the lipophilic moiety is conjugated to a nucleobase, sugar moiety, or internucleosidic linkage.

[0068] In another embodiment, the double-stranded RNAi agent further includes a phosphate or phosphate mimic at the 5′-end of the antisense strand. In one embodiment, the phosphate mimic is a 5′-vinyl phosphonate (VP). In another embodiment, the phosphate mimic is a 5′-cyclopropyl phosphonate.

[0069] In certain embodiments, the double-stranded RNAi agent further includes a targeting ligand that targets a receptor which mediates delivery to a CNS tissue, e.g., a hydrophilic ligand. In certain embodiments, the targeting ligand is a C16 ligand.

[0070] In some embodiments, the double-stranded RNAi agent further includes a targeting ligand that targets a brain tissue, e.g., striatum.

[0071] In some embodiments, the double-stranded RNAi agent further includes a targeting ligand that targets a liver tissue, e.g., hepatocytes.

[0072] In one embodiment, the lipophilic moiety or targeting ligand is conjugated via a bio-cleavable linker that is DNA, RNA, disulfide, amide, functionalized monosaccharides or oligosaccharides of galactosamine, glucosamine, glucose, galactose, mannose, or a combination thereof.

[0073] In a related embodiment, the 3′ end of the sense strand is protected via an end cap which is a cyclic group having an amine, the cyclic group being pyrrolidinyl, pyrazolinyl, pyrazolidinyl, imidazolinyl, imidazolidinyl, piperidinyl, piperazinyl, [1,3]dioxolanyl, oxazolidinyl, isoxazolidinyl, morpholinyl, thiazolidinyl, isothiazolidinyl, quinoxalinyl, pyridazinonyl, tetrahydrofuranyl, or decalinyl.

[0074] In one embodiment, the RNAi agent includes at least one modified nucleotide that is a 2′-O-methyl modified nucleotide, a 2′-fluoro modified nucleotide, a nucleotide that includes a glycol nucleic acid (GNA) or a nucleotide that includes a vinyl phosphonate. Optionally, the RNAi agent includes at least one of each of the following modifications: 2′-O-methyl modified nucleotide, a 2′-fluoro modified nucleotide, a nucleotide comprising a glycol nucleic acid (GNA) and a nucleotide comprising vinyl phosphonate.

[0075] In another embodiment, the RNAi agent includes a pattern of modified nucleotides as provided below in Tables 2 or 12, optionally where locations of 2′-C16, 2′-O-methyl, GNA, phosphorothioate and 2′-fluoro modifications are irrespective of the individual nucleotide base sequences of the displayed RNAi agents.

[0076] In embodiments, the dsRNA agent further includes: a terminal, chiral modification occurring at the first internucleotide linkage at the 3′ end of the antisense strand, having the linkage phosphorus atom in Sp configuration; a terminal, chiral modification occurring at the first internucleotide linkage at the 5′ end of the antisense strand, having the linkage phosphorus atom in Rp configuration; or a terminal, chiral modification occurring at the first internucleotide linkage at the 5′ end of the sense strand, having the linkage phosphorus atom in either Rp configuration or Sp configuration.

[0077] In some embodiments, the dsRNA agent further includes: a terminal, chiral modification occurring at the first and second internucleotide linkages at the 3′ end of the antisense strand, having the linkage phosphorus atom in Sp configuration; a terminal, chiral modification occurring at the first internucleotide linkage at the 5′ end of the antisense strand, having the linkage phosphorus atom in Rp configuration; or a terminal, chiral modification occurring at the first internucleotide linkage at the 5′ end of the sense strand, having the linkage phosphorus atom in either Rp or Sp configuration.

[0078] In certain embodiments, the dsRNA agent further includes: a terminal, chiral modification occurring at the first, second and third internucleotide linkages at the 3′ end of the antisense strand, having the linkage phosphorus atom in Sp configuration; a terminal, chiral modification occurring at the first internucleotide linkage at the 5′ end of the antisense strand, having the linkage phosphorus atom in Rp configuration; or a terminal, chiral modification occurring at the first internucleotide linkage at the 5′ end of the sense strand, having the linkage phosphorus atom in either Rp or Sp configuration.

[0079] In embodiments, the dsRNA agent further includes: a terminal, chiral modification occurring at the first, and second internucleotide linkages at the 3′ end of the antisense strand, having the linkage phosphorus atom in Sp configuration; a terminal, chiral modification occurring at the third internucleotide linkages at the 3′ end of the antisense strand, having the linkage phosphorus atom in Rp configuration; a terminal, chiral modification occurring at the first internucleotide linkage at the 5′ end of the antisense strand, having the linkage phosphorus atom in Rp configuration; or a terminal, chiral modification occurring at the first internucleotide linkage at the 5′ end of the sense strand, having the linkage phosphorus atom in either Rp or Sp configuration.

[0080] In some embodiments, the dsRNA agent further includes: a terminal, chiral modification occurring at the first, and second internucleotide linkages at the 3′ end of the antisense strand, having the linkage phosphorus atom in Sp configuration; a terminal, chiral modification occurring at the first, and second internucleotide linkages at the 5′ end of the antisense strand, having the linkage phosphorus atom in Rp configuration; or a terminal, chiral modification occurring at the first internucleotide linkage at the 5′ end of the sense strand, having the linkage phosphorus atom in either Rp or Sp configuration.

[0081] In other embodiments, each of the duplexes of Tables 2, 9, and 12 may be particularly modified to provide another double-stranded iRNA agent of the present disclosure. In one example, the 3′-terminus of each sense strand may be modified by removing the 3′-terminal L96 ligand and exchanging the two phosphodiester internucleotide linkages between the three 3′-terminal nucleotides with phosphorothioate internucleotide linkages. That is, the three 3′-terminal nucleotides (N) of a sense sequence of the formula:

5′-N₁— . . . —Nₙ₋₂Nₙ₋₁NₙL96-3′

may be replaced with

5′-N₁— . . . —N_{n-2S}N_{n-1S}Nₙ-3′.

[0082] That is, for example, for AD-1549052, the sense sequence:

asasgag(Chd)aaGfUJfGfacaaauguuaL96

may be replaced with

asasgag(Chd)aaGfUfGfacaaaugususa

while the antisense sequence remains unchanged to provide another double-stranded iRNA agent of the present disclosure. In other examples, the sense strand of each of the following duplexes are modified according to the preceding description to provide a duplex of the disclosure: AD-596172, AD-596323, AD-596177, AD-596137, AD-596130, AD-596231, AD-595926, AD-596124, AD-596133, AD-595854, AD-596175, AD-596170, AD-596436, AD-596319, AD-596168, AD-596215, AD-596425, AD-595769, AD-596171, AD-596392, AD-596402, AD-596144, AD-596396, AD-596517, AD-596426, AD-596169, AD-596391, AD-596320, AD-596283, AD-596362, AD-596431, AD-596515, AD-596128, AD-596235, AD-596322, AD-596427, AD-596127, AD-595855, AD-596129, and AD-595866. In other examples, the sense strand of each of the following duplexes are modified according to the preceding description to provide a duplex of the disclosure: AD-596137.1, AD-596319.1, AD-596177.1, AD-596172.1, AD-596323.1, AD-596215.1, AD-596231.1, AD-596170.1, AD-596168.1, AD-596130.1, AD-595854.1, AD-595926.1, AD-596133.1, AD-596175.1, AD-596171.1, AD-595769.1, AD-596392.1, AD-596425.1, AD-596515.1, AD-596144.1, AD-596436.1, AD-596124.1, AD-596402.1, AD-596517.1, AD-596391.1, AD-596169.1, AD-596396.1, AD-596427.1, AD-596426.1, AD-595866.1, AD-596431.1, AD-596362.1, AD-596320.1, AD-595855.1, AD-596235.1, AD-596283.1, AD-596129.1, AD-596390.1, AD-596131.1, AD-58643.17, AD-596322.1, AD-596128.1, and AD-596127.1. In other examples, the sense strand of each of the following duplexes are modified according to the preceding description to provide a duplex of the disclosure: AD-595769.2, AD-595770.1, AD-595773.1, AD-595774.1, AD-595926.2, AD-595933.1, AD-595935.1, AD-595937.1, AD-595938.1, AD-596099.1, AD-596215.2, AD-596217.1, AD-596276.1, AD-596328.1, AD-596390.2, AD-596391.2, AD-596392.2, AD-596393.1, AD-596394.1, AD-596395.1, AD-596396.2, AD-596397.1, AD-596398.1, AD-596401.1, AD-596402.2, AD-596403.1, AD-596521.1, AD-596564.1, AD-689314.1, AD-689315.1, AD-689316.1, AD-689318.1, AD-689319.1, AD-689320.1, AD-689452.1, AD-689459.1, AD-689461.1, AD-689462.1, AD-689463.1, AD-689464.1, AD-689615.1, AD-689616.1, AD-689747.1, AD-689748.1, AD-689753.1, AD-689755.1, AD-689786.1, AD-689787.1, AD-689788.1, AD-689835.1, AD-689907.1, AD-689925.1, AD-689926.1, AD-689927.1, AD-689928.1, AD-689929.1, AD-689930.1, AD-689931.1, AD-689932.1, AD-689933.1, AD-689934.1, AD-689935.1, AD-689936.1, AD-689937.1, AD-689938.1, AD-689939.1, AD-690068.1, AD-690079.1, AD-690080.1, AD-690092.1, AD-691823.1, AD-691824.1, AD-691843.1, AD-691844.1, AD-691845.1, AD-691875.1, AD-691953.1, AD-ans 691954.1. In other examples, the sense strand of each of the following duplexes are modified according to the preceding description to provide a duplex of the disclosure: AD-1549052.1, AD-1549359.1, AD-1549054.1, AD-1571262.1, AD-1549333.1, AD-1549407.1, AD-1548854.1, AD-1549403.1, AD-1549283.1, AD-1549641.1, AD-1549267.1, AD-1548851.1, AD-1548869.1, AD-1549272.1, AD-1571164.1, AD-1549354.1, AD-1571188.1, AD-1549401.1, AD-1548886.1, AD-1571191.1, AD-1571193.1, AD-1548884.1, AD-1571187.1, AD-1549357.1, AD-1571194.1, AD-1549285.1, AD-1549266.1, AD-1549351.1, AD-1548870.1, AD-1549245.1, AD-1549334.1, AD-1549397.1, AD-1549290.1, AD-1549525.1, AD-1549406.1, AD-1549284.1, AD-1549439.1, AD-1549269.1, AD-1549518.1, AD-1549628.1, AD-1571199.1, AD-1549442.1, AD-1549596.1, AD-1549400.1, AD-1549280.1, AD-1549441.1, AD-1549556.1, AD-1571202.1, AD-1549271.1, AD-1549517.1, AD-1549293.1, AD-1549639.1, AD-1549443.1, AD-1571195.1, AD-1549595.1, AD-1549546.1, AD-1549246.1, AD-1571192.1, AD-1571165.1, AD-1549270.1, AD-1549521.1, AD-1549541.1, AD-1549552.1, AD-1549522.1, AD-1549545.1, AD-1549519.1, AD-1549630.1, AD-1549353.1, AD-1549544.1, AD-1549642.1, AD-1549438.1, AD-1549412.1, AD-1571198.1, AD-1571258.1, AD-1571201.1, AD-1549640.1, AD-1571266.1, AD-1571172.1, AD-1549527.1, AD-1549547.1, AD-1549037.1, AD-1571205.1, AD-1549053.1, AD-1571264.1, AD-1571186.1, AD-1571204.1, AD-1549555.1, AD-1548887.1, AD-1549426.1, AD-1548844.1, AD-1549520.1, AD-1549543.1, AD-1549548.1, AD-1571206.1, AD-1549210.1, AD-1571200.1, AD-1571207.1, AD-1549542.1, AD-1549211.1, AD-1571263.1, AD-1549391.1, AD-1549212.1, AD-1549268.1, AD-1549352.1, AD-1571261.1, AD-1549044.1, AD-1549554.1, AD-1548975.1, AD-1549432.1, AD-1549524.1, AD-1549643.1, AD-1571196.1, AD-1571203.1, AD-1549425.1, AD-1549264.1, AD-1549249.1, AD-1571257.1, AD-1549265.1, AD-1548843.1, AD-1548845.1, AD-1571256.1, AD-1571255.1, AD-1571174.1, AD-1571173.1, AD-1548876.1, AD-1549615.1, AD-1571166.1, AD-1571269.1, AD-1548976.1, AD-1549038.1, AD-1571167.1, AD-1571170.1, AD-1548888.1, AD-1571189.1, AD-1571259.1, AD-1549224.1, AD-1571208.1, AD-1549222.1, AD-1571268.1, AD-1571270.1, AD-1549217.1, AD-1571184.1, AD-1571271.1, AD-1571272.1, AD-1571190.1, AD-1549055.1, AD-1571169.1, and AD-1571265.1.

[0083] An additional aspect of the instant disclosure provides a cell harboring a dsRNA agent of the instant disclosure.

[0084] One aspect of the instant disclosure provides a pharmaceutical composition for inhibiting expression of a gene encoding SNCA that includes a dsRNA agent of the instant disclosure.

[0085] An additional aspect of the disclosure provides a method of inhibiting expression of a SNCA gene in a cell, the method involving: (a) contacting the cell with a double stranded RNAi agent of the instant disclosure or a pharmaceutical composition of the instant disclosure; and (b) maintaining the cell produced in step (a) for a time sufficient to obtain degradation of the mRNA transcript of a SNCA gene, thereby inhibiting expression of the SNCA gene in the cell.

[0086] In one embodiment, the cell is within a subject. Optionally, the subject is a human.

[0087] In certain embodiments, the subject is a rhesus monkey, a cynomolgous monkey, a mouse, or a rat.

[0088] In embodiments, the expression of SNCA is inhibited by at least 50%.

[0089] In certain embodiments, the subject meets at least one diagnostic criterion for a SNCA-associated disease.

[0090] In certain embodiments, the human subject has been diagnosed with or suffers from a SNCA-associated neurodegenerative disease, e.g., a synucleinopathy, such as PD, multiple system atrophy, Lewy body dementia (LBD), pure autonomic failure (PAF), Pick's disease, progressive supranuclear palsy, dementia pugilistica, parkinsonism linked to chromosome 17, Lytico-Bodig disease, tangle predominant dementia, Argyrophilic grain disease, ganglioglioma, gangliocytoma, meningioangiomatosis, subacute sclerosing panencephalitis, lead encephalopathy, tuberous sclerosis, Hallervorden-Spatz disease, lipofuscinosis, corticobasal degeneration, frontotemporal dementia, frontotemporal lobar degeneration, Alzheimer's disease, Huntington's disease, Down's syndrome, psychosis, schizophrenia and Creutzfeldt-Jakob disease.

[0091] In certain embodiments, the method further involves administering an additional therapeutic agent or therapy to the subject. Exemplary additional therapeutics and treatments include, for example, sedatives, antidepressants, clonazepam, sodium valproate, opiates, antiepileptic drugs, cholinesterase inhibitors, memantine, benzodiazepines, levodopa, COMT inhibitors (e.g., tolcapone and entacapone), dopamine agonists (e.g., bromocriptine, pergolide, pramipexole, ropinirole, piribedil, cabergoline, apomorphine and lisuride), MAO-B inhibitors (e.g., safinamide, selegiline and rasagiline), amantadine, an anticholinergic, modafinil, pimavanserin, doxepin, rasagline, an antipsychotic, an atypical antipsychotic (e.g., amisulpride, olanzapine, risperidone, and clozapine), riluzole, edaravone, deep brain stimulation, non-invasive ventilation (NIV), invasive ventilation physical therapy, occupational therapy, speech therapy, dietary changes and swallowing technique a feeding tube, a PEG tube, probiotics, and psychological therapy.

[0092] In certain embodiments, the double stranded RNAi agent is administered at a dose of about 0.01 mg/kg to about 50 mg/kg.

[0093] In some embodiments, the double stranded RNAi agent is administered to the subject intrathecally.

[0094] In one embodiment, the method reduces the expression of a SNCA gene in a brain (e.g., striatum) or spine tissue. Optionally, the brain or spine tissue is striatum, cortex, cerebellum, cervical spine, lumbar spine, or thoracic spine.

[0095] In some embodiments, the double stranded RNAi agent is administered to the subject subcutaneously.

[0096] In one embodiment, the method reduces the expression of a SNCA gene in the liver.

[0097] In other embodiments, the method reduces the expression of a SNCA gene in the liver and the brain.

[0098] Another aspect of the instant disclosure provides a method of treating a subject diagnosed with a SNCA-associated neurodegenerative disease, the method involving administering to the subject a therapeutically effective amount of a dsRNA agent or a pharmaceutical composition of the instant disclosure, thereby treating the subject.

[0099] In one embodiment, treating involves amelioration of at least on sign or symptom of the disease.

[0100] In certain embodiments, treating includes prevention of progression of the disease.

[0101] In embodiments, the SNCA-associated disease is characterized by symptoms of Parkinson's Disease (PD), such as tremors, slowed movement (bradykinesia), rigid muscles, impaired posture and balance, loss of automatic movements, speech changes, writing changes; symptoms of Lewy body dementia such as visual, auditory, olfactory, or tactile hallucinations, signs of Parkinson's disease (parkinsonian signs), poor regulation of body functions (autonomic nervous systems) such as dizziness, falls and bowel issues, cognitive problems such as confusion, poor attention, visual-spatial problems and memory loss, sleep difficulties such as rapid eye movement (REM) sleep behavior disorder (in which dreams are physically acted out while asleep), fluctuating attention including episodes of drowsiness, long periods of staring into space, long naps during the day or disorganized speech, depression, and apathy, symptoms of pure autonomic failure such as orthostatic hypotension (a sudden drop in blood pressure that occurs when a person stands up, causing a person to feel dizzy and lightheaded, and the need to sit, squat, or lie down in order to prevent fainting), symptoms of multiple system atrophy such as slowness of movement, tremor, rigidity (stiffness), clumsiness or incoordination, impaired speech, a croaky, quivering voice, fainting or lightheadedness due to orthostatic hypotension, bladder control problems, such as a sudden urge to urinate or difficulty emptying the bladder, contractures (chronic shortening of muscles or tendons around joints, which prevents the joints from moving freely) in the hands or limbs, Pisa syndrome (an abnormal posture in which the body appears to be leaning to one side), antecollis (in which the neck bends forward and the head drops down), involuntary and uncontrollable sighing or gasping, and sleep difficulties such as rapid eye movement (REM) sleep behavior disorder.

[0102] In certain embodiments, the SNCA-associated disease is a synucleinopathy, such as PD, multiple system atrophy, Lewy body dementia (LBD), pure autonomic failure (PAF), Pick's disease, progressive supranuclear palsy, dementia pugilistica, parkinsonism linked to chromosome 17, Lytico-Bodig disease, tangle predominant dementia, Argyrophilic grain disease, ganglioglioma, gangliocytoma, meningioangiomatosis, subacute sclerosing panencephalitis, lead encephalopathy, tuberous sclerosis, Hallervorden-Spatz disease, lipofuscinosis, corticobasal degeneration, frontotemporal dementia, frontotemporal lobar degeneration, Alzheimer's disease, Huntington's disease, Down's syndrome, psychosis, schizophrenia and Creutzfeldt-Jakob disease.

[0103] An additional aspect of the disclosure provides a method of preventing development of a SNCA-associated neurodegenerative disease in a subject meeting at least one diagnostic criterion for a SNCA-associated neurodegenerative disease, the method involving administering to the subject a therapeutically effective amount of a dsRNA agent or pharmaceutical composition of the disclosure, thereby preventing the development of a SNCA-associated neurodegenerative disease in the subject meeting at least one diagnostic criterion for a SNCA-associated neurodegenerative disease.

[0104] In certain embodiments, the method further involves administering to the subject an additional agent or a therapy suitable for treatment or prevention of a SNCA-associated disease or disorder.

[0105] Another aspect of the instant disclosure provides a method of inhibiting the expression of SNCA in a subject, the method involving: administering to the subject a therapeutically effective amount of a double stranded RNAi agent of the disclosure or a pharmaceutical composition of the disclosure, thereby inhibiting the expression of SNCA in the subject.

[0106] An additional aspect of the disclosure provides a method for treating or preventing a disorder or SNCA-associated neurodegenerative disease or disorder in a subject, the method involving administering to the subject a therapeutically effective amount of a double stranded RNAi agent of the disclosure or a pharmaceutical composition of the disclosure, thereby treating or preventing a SNCA-associated neurodegenerative disease or disorder in the subject.

[0107] Another aspect of the instant disclosure provides a double stranded RNAi agent for inhibiting expression of a SNCA gene, where the double stranded RNAi agent includes a sense strand complementary to an antisense strand, where the antisense strand includes a region complementary to part of an mRNA encoding SNCA, where each strand is about 14 to about 30 nucleotides in length, where the double stranded RNAi agent is represented by formula (III):

sense: 5′nₚ-Nₐ—(XXX)i-N_{b}—YYY—N_{b}—(ZZZ)ⱼ—Nₐ-n_{q}3′ antisense: 3′nₚ′—Nₐ′—(X′X′X′)ₖ—N_{b}′—Y′Y′Y′—N_{b}′—(Z′Z′Z′)ₗ—Nₐ′-n_{q}′5′ (III)
[0108] where:
[0109] i, j, k, and 1 are each independently 0 or 1;
[0110] p, p′, q, and q′ are each independently 0-6;
[0111] each Nₐ and Nₐ′ independently represents an oligonucleotide sequence including 0-25 nucleotides which are either modified or unmodified or combinations thereof, each sequence including at least two differently modified nucleotides;
[0112] each N_{b} and N_{b}′ independently represents an oligonucleotide sequence including 0-10 nucleotides which are either modified or unmodified or combinations thereof;
[0113] each nₚ, nₚ′, n_{q}, and n_{q}′, each of which may or may not be present, independently represents an overhang nucleotide;
[0114] XXX, YYY, ZZZ, X′X′X′, Y′Y′Y′, and Z′Z′Z′ each independently represent one motif of three identical modifications on three consecutive nucleotides;
[0115] modifications on N_{b} differ from the modification on Y and modifications on N_{b}′ differ from the modification on Y′; and
[0116] where the sense strand is conjugated to at least one ligand.

[0117] In one embodiment, i is 0; j is 0; i is 1; j is 1; both i and j are 0; or both i and j are 1.

[0118] In another embodiment, k is 0; 1 is 0; k is 1; 1 is 1; both k and l are 0; or both k and l are 1.

[0119] In certain embodiments, XXX is complementary to X′X′X′, YYY is complementary to Y′Y′Y′, and ZZZ is complementary to Z′Z′Z′.

[0120] In another embodiment, the YYY motif occurs at or near the cleavage site of the sense strand.

[0121] In an additional embodiment, the Y′Y′Y′ motif occurs at the 11, 12 and 13 positions of the antisense strand from the 5′-end. Optionally, the Y′ is 2′-O-methyl.

[0122] In some embodiments, formula (III) is represented by formula (IIIa):

sense: 5′nₚ-Nₐ—YYY—Nₐ-n_{q}3′ antisense: 3′n_{p′}-N_{a′}—Y′Y′Y′—N_{a′}-n_{q′}5′ (IIIa).

[0123] In another embodiment, formula (III) is represented by formula (IIIb):

sense: 5′nₚ-Nₐ—YYY—N_{b}—ZZZ—Nₐ-n_{q}3′ antisense: 3′n_{p′}-N_{a′}—Y′Y′Y′—N_{b′}—Z′Z′Z′—N_{a′}-n_{q′}5′ (IIIb)
[0124] where each N_{b} and N_{b}′ independently represents an oligonucleotide sequence including 1-5 modified nucleotides.

[0125] In an additional embodiment, formula (III) is represented by formula (IIIc):

sense: 5′nₚ-Nₐ—XXX—N_{b}—YYY—Nₐ-n_{q}3′ antisense: 3′n_{p′}-N_{a′}—X′X′X′—N_{b′}—Y′Y′Y′—N_{a′}— n_{q′}5′ (IIIc)
[0126] where each N_{b} and N_{b}′ independently represents an oligonucleotide sequence including 1-5 modified nucleotides.

[0127] In certain embodiments, formula (III) is represented by formula (IIId):

sense: 5′nₚ-Nₐ—XXX—N_{b}—YYY—N_{b}—ZZZ—Nₐ-n_{q}3′ antisense: 3′n_{p′}-N_{a′}—X′X′X′—N_{b′}—Y′Y′Y′—N_{b′}—Z′Z′Z′—N_{a′}-n_{q′}5′ (IIId)
[0128] where each N_{b} and N_{b}′ independently represents an oligonucleotide sequence including 1-5 modified nucleotides and each Nₐ and Nₐ′ independently represents an oligonucleotide sequence including 2-10 modified nucleotides.

[0129] In another embodiment, the double stranded region is 15-30 nucleotide pairs in length. Optionally, the double stranded region is 17-23 nucleotide pairs in length.

[0130] In certain embodiments, the double stranded region is 17-25 nucleotide pairs in length. Optionally, the double stranded region is 23-27 nucleotide pairs in length.

[0131] In some embodiments, the double stranded region is 19-21 nucleotide pairs in length. Optionally, the double stranded region is 21-23 nucleotide pairs in length.

[0132] In certain embodiments, each strand has 15-30 nucleotides. Optionally, each strand has 19-30 nucleotides. Optionally, each strand has 19-23 nucleotides.

[0133] In certain embodiments, the double stranded region is 19-21 nucleotide pairs in length and each strand has 19-23 nucleotides.

[0134] In another embodiment, the modifications on the nucleotides of the RNAi agent are LNA, glycol nucleic acid (GNA), HNA, CeNA, 2′-methoxyethyl, 2′-O-alkyl, 2′-O-allyl, 2′-C-allyl, 2′-fluoro, 2′-deoxy or 2′-hydroxyl, and combinations thereof. Optionally, the modifications on nucleotides include 2′-O-methyl, 2′-fluoro or GNA, and combinations thereof. In a related embodiment, the modifications on the nucleotides are 2′-O-methyl or 2′-fluoro modifications.

[0135] In one embodiment the RNAi agent includes a ligand that is or includes one or more lipophilic, e.g., C16, moieties attached through a bivalent or trivalent branched linker.

[0136] In other embodiments, the agent further comprises a targeting ligand that targets a liver tissue, e.g., one or more GalNAc derivatives.

[0137] In yet other embodiments, the agents further comprise a lipophilic ligand, e.g., a C16 ligand, conjugated to the 3′ end of the sense strand through a monovalent or branched bivalent or trivalent linker and a targeting ligand that targets a liver tissue, e.g., one or more GalNAc derivatives conjugated to the 3′ end of the sense strand through a monovalent or branched bivalent or trivalent linker.

[0138] In certain embodiments, the ligand is attached to the 3′ end of the sense strand.

[0139] In some embodiments, the RNAi agent further includes at least one phosphorothioate or methylphosphonate internucleotide linkage. In a related embodiment, the phosphorothioate or methylphosphonate internucleotide linkage is at the 3′-terminus of one strand. Optionally, the strand is the antisense strand. In another embodiment, the strand is the sense strand. In a related embodiment, the phosphorothioate or methylphosphonate internucleotide linkage is at the 5′-terminus of one strand. Optionally, the strand is the antisense strand. In another embodiment, the strand is the sense strand.

[0140] In another embodiment, the phosphorothioate or methylphosphonate internucleotide linkage is at the both the 5′- and 3′-terminus of one strand. Optionally, the strand is the antisense strand. In another embodiment, the strand is the sense strand.

[0141] In an additional embodiment, the base pair at the 1 position of the 5′-end of the antisense strand of the RNAi agent duplex is an A:U base pair.

[0142] In certain embodiments, the Y nucleotides contain a 2′-fluoro modification.

[0143] In some embodiments, the Y′ nucleotides contain a 2′-O-methyl modification.

[0144] In certain embodiments, p′>O. Optionally, p′=2.

[0145] In some embodiments, q′=O, p=O, q=O, and p′ overhang nucleotides are complementary to the target mRNA.

[0146] In certain embodiments, q′=O, p=O, q=O, and p′ overhang nucleotides are non-complementary to the target mRNA.

[0147] In one embodiment, the sense strand of the RNAi agent has a total of 21 nucleotides and the antisense strand has a total of 23 nucleotides.

[0148] In another embodiment, at least one nₚ′ is linked to a neighboring nucleotide via a phosphorothioate linkage. Optionally, all nₚ′ are linked to neighboring nucleotides via phosphorothioate linkages.

[0149] In certain embodiments, the SNCA RNAi agent of the instant disclosure is one of those listed in Tables 2, 3, 12 or 13. In some embodiments, all of the nucleotides of the sense strand and all of the nucleotides of the antisense strand include a modification.

[0150] Another aspect of the instant disclosure provides a double stranded RNAi agent for inhibiting expression of a SNCA gene in a cell, where the double stranded RNAi agent includes a sense strand complementary to an antisense strand, where the antisense strand includes a region complementary to part of an mRNA encoding a SNCA gene, where each strand is about 14 to about 30 nucleotides in length, where the double stranded RNAi agent is represented by formula (III):

sense: 5′nₚ-Nₐ—(XXX)ᵢ—N_{b}—YYY—N_{b}—(ZZZ)ⱼ—Nₐ-n_{q}3′ antisense: 3′np′-Nₐ′—(X′X′X′)ₖ—N_{b}′—Y′Y′Y′—N_{b}′—(Z′Z′Z′)ₗ—Nₐ′-n_{q}′5′ (III)
[0151] where:
[0152] i, j, k, and 1 are each independently 0 or 1;
[0153] p, p′, q, and q′ are each independently 0-6;
[0154] each Nₐ and Nₐ′ independently represents an oligonucleotide sequence including 0-25 nucleotides which are either modified or unmodified or combinations thereof, each sequence including at least two differently modified nucleotides;
[0155] each N_{b} and N_{b}′ independently represents an oligonucleotide sequence including 0-10 nucleotides which are either modified or unmodified or combinations thereof,
[0156] each nₚ, nₚ′, n_{q}, and n_{q}′, each of which may or may not be present independently represents an overhang nucleotide;
[0157] XXX, YYY, ZZZ, X′X′X′, Y′Y′Y′, and Z′Z′Z′ each independently represent one motif of three identical modifications on three consecutive nucleotides, and where the modifications are 2′-O-methyl or 2′-fluoro modifications;
[0158] modifications on N_{b} differ from the modification on Y and modifications on N_{b}′ differ from the modification on Y′; and
[0159] where the sense strand is conjugated to at least one ligand, optionally where the ligand is one or more lipophilic, e.g., C16, ligands, or one or more GalNAc derivatives.

[0160] An additional aspect of the instant disclosure provides a double stranded RNAi agent for inhibiting expression of a SNCA gene in a cell, where the double stranded RNAi agent includes a sense strand complementary to an antisense strand, where the antisense strand includes a region complementary to part of an mRNA encoding SNCA, where each strand is about 14 to about 30 nucleotides in length, where the double stranded RNAi agent is represented by formula (III):

sense: 5′nₚ-Nₐ—(XXX)ᵢ—N_{b}—YYY—N_{b}—(ZZZ)ⱼ—Nₐ-n_{q}3′ antisense: 3′nₚ′-Nₐ′—(X′X′X′)ₖ—N_{b}′—Y′Y′Y′—N_{b}′—(Z′Z′Z′)ₗ—Nₐ′-n_{q}′5′ (III)
[0161] where:
[0162] i, j, k, and 1 are each independently 0 or 1;
[0163] each nₚ, n_{q}, and n_{q}′, each of which may or may not be present, independently represents an overhang nucleotide;
[0164] p, q, and q′ are each independently 0-6;
[0165] nₚ′>0 and at least one nₚ′ is linked to a neighboring nucleotide via a phosphorothioate linkage;
[0166] each Nₐ and Nₐ′ independently represents an oligonucleotide sequence including 0-25 nucleotides which are either modified or unmodified or combinations thereof, each sequence including at least two differently modified nucleotides;
[0167] each N_{b} and N_{b}′ independently represents an oligonucleotide sequence including 0-10 nucleotides which are either modified or unmodified or combinations thereof;
[0168] XXX, YYY, ZZZ, X′X′X′, Y′Y′Y′, and Z′Z′Z′ each independently represent one motif of three identical modifications on three consecutive nucleotides, and where the modifications are 2′-O-methyl, glycol nucleic acid (GNA) or 2′-fluoro modifications;
[0169] modifications on N_{b} differ from the modification on Y and modifications on N_{b}′ differ from the modification on Y′; and
[0170] where the sense strand is conjugated to at least one ligand, optionally where the ligand is one or more lipophilic, e.g., C16, ligands, or one or more GalNAc derivatives.

[0171] Another aspect of the instant disclosure provides a double stranded RNAi agent for inhibiting expression of a SNCA gene in a cell, where the double stranded RNAi agent includes a sense strand complementary to an antisense strand, where the antisense strand includes a region complementary to part of an mRNA encoding SNCA (SEQ ID NO: 1, or a nucleotide sequence having at least 90% nucleotide sequence identity, e.g. 90, 91, 92, 93, 94, 95, 96, 97, 98, 99 or 100% identity, to the entire nucleotide sequence of SEQ ID NO: 1), where each strand is about 14 to about 30 nucleotides in length, where the double stranded RNAi agent is represented by formula (III):

sense: 5′nₚ-Nₐ—(XXX)ᵢ—N_{b}—YYY—N_{b}—(ZZZ)ⱼ—Nₐ-n_{q}3′ antisense: 3′nₚ′—Nₐ′—(X′X′X′)ₖ—N_{b}′—Y′Y′Y′—N_{b}′—(Z′Z′Z′)ₗ—Nₐ′-n_{q}′5′ (III)
[0172] where:
[0173] i, j, k, and 1 are each independently 0 or 1;
[0174] each nₚ, n_{q}, and n_{q}′, each of which may or may not be present, independently represents an overhang nucleotide;
[0175] p, q, and q′ are each independently 0-6;
[0176] nₚ′>0 and at least one nₚ′ is linked to a neighboring nucleotide via a phosphorothioate linkage;
[0177] each Nₐ and Nₐ′ independently represents an oligonucleotide sequence including 0-25 nucleotides which are either modified or unmodified or combinations thereof, each sequence including at least two differently modified nucleotides;
[0178] each N_{b} and N_{b}′ independently represents an oligonucleotide sequence including 0-10 nucleotides which are either modified or unmodified or combinations thereof;
[0179] XXX, YYY, ZZZ, X′X′X′, Y′Y′Y′, and Z′Z′Z′ each independently represent one motif of three identical modifications on three consecutive nucleotides, and where the modifications are 2′-O-methyl or 2′-fluoro modifications;
[0180] modifications on N_{b} differ from the modification on Y and modifications on N_{b}′ differ from the modification on Y′; and
[0181] where the sense strand is conjugated to at least one ligand, optionally where the ligand is one or more lipophilic, e.g., C16, ligands, or one or more GalNAc derivatives.

[0182] An additional aspect of the instant disclosure provides a double stranded RNAi agent for inhibiting expression of a SNCA gene in a cell, where the double stranded RNAi agent includes a sense strand complementary to an antisense strand, where the antisense strand includes a region complementary to part of an mRNA encoding SNCA (SEQ ID NO: 1, or a nucleotide sequence having at least 90% nucleotide sequence identity, e.g. 90, 91, 92, 93, 94, 95, 96, 97, 98, 99 or 100% identity, to the entire nucleotide sequence of SEQ ID NO: 1), where each strand is about 14 to about 30 nucleotides in length, where the double stranded RNAi agent is represented by formula (III):

sense: 5′nₚ-Nₐ—(XXX)ᵢ—N_{b}—YYY—N_{b}—(ZZZ)ⱼ—Nₐ-n_{q}3′ antisense: 3′nₚ′—Nₐ′—(X′X′X′)ₖ—N_{b}′—Y′Y′Y′—N_{b}′—(Z′Z′Z′)ₗ—Nₐ′-n_{q}′5′ (III)

where:
[0183] i, j, k, and 1 are each independently 0 or 1;
[0184] each nₚ, n_{q}, and n_{q}′, each of which may or may not be present, independently represents an overhang nucleotide;
[0185] p, q, and q′ are each independently 0-6;
[0186] nₚ′>0 and at least one nₚ′ is linked to a neighboring nucleotide via a phosphorothioate linkage;
[0187] each Nₐ and Nₐ′ independently represents an oligonucleotide sequence including 0-25 nucleotides which are either modified or unmodified or combinations thereof, each sequence including at least two differently modified nucleotides;
[0188] each N_{b} and N_{b}′ independently represents an oligonucleotide sequence including 0-10 nucleotides which are either modified or unmodified or combinations thereof;
[0189] XXX, YYY, ZZZ, X′X′X′, Y′Y′Y′, and Z′Z′Z′ each independently represent one motif of three identical modifications on three consecutive nucleotides, and where the modifications are 2′-O-methyl or 2′-fluoro modifications;
[0190] modifications on N_{b} differ from the modification on Y and modifications on N_{b}′ differ from the modification on Y′;
[0191] where the sense strand includes at least one phosphorothioate linkage; and
[0192] where the sense strand is conjugated to at least one ligand, optionally where the ligand is one or more lipophilic, e.g., C16, ligands or one or more GalNAc derivatives.

[0193] Another aspect of the instant disclosure provides a double stranded RNAi agent for inhibiting expression of a SNCA gene in a cell, where the double stranded RNAi agent includes a sense strand complementary to an antisense strand, where the antisense strand includes a region complementary to part of an mRNA encoding SNCA (SEQ ID NO: 1, or a nucleotide sequence having at least 90% nucleotide sequence identity, e.g. 90, 91, 92, 93, 94, 95, 96, 97, 98, 99 or 100% identity, to the entire nucleotide sequence of SEQ ID NO: 1), where each strand is about 14 to about 30 nucleotides in length, where the double stranded RNAi agent is represented by formula (III):

sense: 5′nₚ-Nₐ—YYY—Nₐ-n_{q}3′ antisense: 3′nₚ′—Nₐ′—Y′Y′Y′— Nₐ′-n_{q}′5′ (IIIa)
[0194] where:
[0195] each nₚ, n_{q}, and n_{q}′, each of which may or may not be present, independently represents an overhang nucleotide;
[0196] p, q, and q′ are each independently 0-6;
[0197] nₚ′>0 and at least one nₚ′ is linked to a neighboring nucleotide via a phosphorothioate linkage;
[0198] each Nₐ and Nₐ′ independently represents an oligonucleotide sequence including 0-25 nucleotides which are either modified or unmodified or combinations thereof, each sequence including at least two differently modified nucleotides;
[0199] YYY and Y′Y′Y′ each independently represent one motif of three identical modifications on three consecutive nucleotides, and where the modifications are 2′-O-methyl or 2′-fluoro modifications;
[0200] where the sense strand includes at least one phosphorothioate linkage; and
[0201] where the sense strand is conjugated to at least one ligand, optionally where the ligand is one or more lipophilic, e.g., C16 ligands, or one or more GalNAc derivatives.

[0202] An additional aspect of the instant disclosure provides a double stranded RNAi agent for inhibiting expression of a SNCA gene, where the double stranded RNAi agent targeted to SNCA includes a sense strand and an antisense strand forming a double stranded region, where the sense strand includes at least 15 contiguous nucleotides differing by no more than 3 nucleotides (i.e., differing by 3, 2, 1, or 0 nucleotides) from any one of the nucleotide sequences of SEQ ID NOs: 1, 3, 5, and 7, or a nucleotide sequence having at least 90% nucleotide sequence identity, e.g. 90, 91, 92, 93, 94, 95, 96, 97, 98, 99 or 100% identity, to the entire nucleotide sequence of any one of SEQ ID NOs: 1, 3, 5, or 7, and the antisense strand includes at least 15 contiguous nucleotides differing by no more than 3 nucleotides (i.e., differing by 3, 2, 1, or 0 nucleotides) from any one of the nucleotide sequences of SEQ ID NOs: 2, 4, 6, and 8, or a nucleotide sequence having at least 90% nucleotide sequence identity, e.g. 90, 91, 92, 93, 94, 95, 96, 97, 98, 99 or 100% identity, to the entire nucleotide sequence of any one of SEQ ID NOs: 2, 4, 6, and 8; where a substitution of a uracil for any thymine in the sequences provided in the SEQ ID NOs: 1-8 (when comparing aligned sequences) does not count as a difference that contributes to the differing by no more than 3 nucleotides from any one of the nucleotide sequences provided in SEQ ID NOs: 1-8, where substantially all of the nucleotides of the sense strand include a modification that is a 2′-O-methyl modification, a GNA or a 2′-fluoro modification, where the sense strand includes two phosphorothioate internucleotide linkages at the 5′-terminus, where substantially all of the nucleotides of the antisense strand include a modification selected from the group consisting of a 2′-O-methyl modification and a 2′-fluoro modification, where the antisense strand includes two phosphorothioate internucleotide linkages at the 5′-terminus and two phosphorothioate internucleotide linkages at the 3′-terminus, and where the sense strand is conjugated to one or more lipophilic, e.g., C16, ligands, optionally, further comprising a liver targeting ligand, e.g., a ligand comprising one or more GalNAc derivatives.

[0203] Another aspect of the instant disclosure provides a double stranded RNAi agent for inhibiting expression of a SNCA gene, where the double stranded RNAi agent targeted to SNCA includes a sense strand and an antisense strand forming a double stranded region, where the sense strand includes at least 15 contiguous nucleotides differing by no more than 3 nucleotides (i.e., differing by 3, 2, 1, or 0 nucleotides) from any one of the nucleotide sequences of SEQ ID NOs: 1, 3, 5, and 7, or a nucleotide sequence having at least 90% nucleotide sequence identity, e.g. 90, 91, 92, 93, 94, 95, 96, 97, 98, 99 or 100% identity, to the entire nucleotide sequence of any one of SEQ ID NOs: 1, 3, 5, or 7, and the antisense strand includes at least 15 contiguous nucleotides differing by no more than 3 nucleotides (i.e., differing by 3, 2, 1, or 0 nucleotides) from any one of the nucleotide sequences of SEQ ID NOs: 2, 4, 6, and 8, or a nucleotide sequence having at least 90% nucleotide sequence identity, e.g. 90, 91, 92, 93, 94, 95, 96, 97, 98, 99 or 100% identity, to the entire nucleotide sequence of any one of SEQ ID NOs: 2, 4, 6, and 8, where a substitution of a uracil for any thymine in the sequences provided in the SEQ ID NOs: 1-8 (when comparing aligned sequences) does not count as a difference that contributes to the differing by no more than 3 nucleotides from any one of the nucleotide sequences provided in SEQ ID NOs: 1-8; where the sense strand includes at least one 3′-terminal deoxy-thymine nucleotide (dT), and where the antisense strand includes at least one 3′-terminal deoxy-thymine nucleotide (dT).

[0204] In one embodiment, all of the nucleotides of the sense strand and all of the nucleotides of the antisense strand are modified nucleotides.

[0205] In another embodiment, each strand has 19-30 nucleotides.

[0206] In certain embodiments, the antisense strand of the RNAi agent includes at least one thermally destabilizing modification of the duplex within the first 9 nucleotide positions of the 5′ region or a precursor thereof. Optionally, the thermally destabilizing modification of the duplex is one or more of

[chemical structure]

where B is nucleobase.

[0207] Another aspect of the instant disclosure provides a cell containing a double stranded RNAi agent of the instant disclosure.

[0208] An additional aspect of the instant disclosure provides a pharmaceutical composition for inhibiting expression of a SNCA gene that includes a double stranded RNAi agent of the instant disclosure.

[0209] In one embodiment, the double stranded RNAi agent is administered in an unbuffered solution. Optionally, the unbuffered solution is saline or water.

[0210] In another embodiment, the double stranded RNAi agent is administered with a buffer solution. Optionally, the buffer solution includes acetate, citrate, prolamine, carbonate, or phosphate or any combination thereof. In another embodiment, the buffer solution is phosphate buffered saline (PBS).

[0211] Another aspect of the disclosure provides a pharmaceutical composition that includes a double stranded RNAi agent of the instant disclosure and a lipid formulation.

[0212] In one embodiment, the lipid formulation includes a lipid nanoparticle (LNP).

[0213] Another aspect of the instant disclosure provides a kit for performing a method of the instant disclosure, the kit including: a) a double stranded RNAi agent of the instant disclosure, and b) instructions for use, and c) optionally, a device for administering the double stranded RNAi agent to the subject.

[0214] An additional aspect of the instant disclosure provides a double stranded ribonucleic acid (RNAi) agent for inhibiting expression of a SNCA gene, where the RNAi agent possesses a sense strand and an antisense strand, and where the antisense strand includes a region of complementarity which includes at least 15 contiguous nucleotides differing by no more than 3 nucleotides (i.e., differing by 3, 2, 1, or 0 nucleotides), e.g., at least 15 nucleotides (i.e., differing by 3, 2, 1, or 0 nucleotides), at least 19 nucleotides (i.e., differing by 3, 2, 1, or 0 nucleotides), from any one of the antisense strand nucleobase sequences of Tables 2, 3, 12 or 13. In one embodiment, the RNAi agent includes one or more of the following modifications: a 2′-O-methyl modified nucleotide, a 2′-fluoro modified nucleotide, a 2′-C-alkyl-modified nucleotide, a nucleotide comprising a glycol nucleic acid (GNA), a phosphorothioate (PS) and a vinyl phosphonate (VP). Optionally, the RNAi agent includes at least one of each of the following modifications: a 2′-O-methyl modified nucleotide, a 2′-fluoro modified nucleotide, a 2′-C-alkyl-modified nucleotide, a nucleotide comprising a glycol nucleic acid (GNA), a phosphorothioate and a vinyl phosphonate (VP).

[0215] In another embodiment, the RNAi agent includes four or more PS modifications, optionally six to ten PS modifications, optionally eight PS modifications.

[0216] In an additional embodiment, each of the sense strand and the antisense strand of the RNAi agent possesses a 5′-terminus and a 3′-terminus, and the RNAi agent includes eight PS modifications positioned at each of the penultimate and ultimate internucleotide linkages from the respective 3′- and 5′-termini of each of the sense and antisense strands of the RNAi agent.

[0217] In another embodiment, each of the sense strand and the antisense strand of the RNAi agent includes a 5′-terminus and a 3′-terminus, and the RNAi agent includes only one nucleotide including a GNA. Optionally, the nucleotide including a GNA is positioned on the antisense strand at the seventh nucleobase residue from the 5′-terminus of the antisense strand.

[0218] In an additional embodiment, each of the sense strand and the antisense strand of the RNAi agent includes a 5′-terminus and a 3′-terminus, and the RNAi agent includes one to four 2′-C-alkyl-modified nucleotides. Optionally, the 2′-C-alkyl-modified nucleotide is a 2′-C16-modified nucleotide. Optionally, the RNAi agent includes a single 2′-C-alkyl, e.g., C16-modified nucleotide. Optionally, the single 2′-C-alkyl, e.g., C16-modified nucleotide is located on the sense strand at the sixth nucleobase position from the 5′-terminus of the sense strand.

[0219] In another embodiment, each of the sense strand and the antisense strand of the RNAi agent includes a 5′-terminus and a 3′-terminus, and the RNAi agent includes two or more 2′-fluoro modified nucleotides. Optionally, each of the sense strand and the antisense strand of the RNAi agent includes two or more 2′-fluoro modified nucleotides. Optionally, the 2′-fluoro modified nucleotides are located on the sense strand at nucleobase positions 7, 9, 10 and 11 from the 5′-terminus of the sense strand and on the antisense strand at nucleobase positions 2, 14 and 16 from the 5′-terminus of the antisense strand.

[0220] In an additional embodiment, each of the sense strand and the antisense strand of the RNAi agent includes a 5′-terminus and a 3′-terminus, and the RNAi agent includes one or more VP modifications. Optionally, the RNAi agent includes a single VP modification at the 5′-terminus of the antisense strand.

[0221] In another embodiment, each of the sense strand and the antisense strand of the RNAi agent includes a 5′-terminus and a 3′-terminus, and the RNAi agent includes two or more 2′-O-methyl modified nucleotides. Optionally, the RNAi agent includes 2′-O-methyl modified nucleotides at all nucleobase locations not modified by a 2′-fluoro, a 2′-C-alkyl or a glycol nucleic acid (GNA). Optionally, the two or more 2′-O-methyl modified nucleotides are located on the sense strand at positions 1, 2, 3, 4, 5, 8, 12, 13, 14, 15, 16, 17, 18, 19, 20 and 21 from the 5′-terminus of the sense strand and on the antisense strand at positions 1, 3, 4, 5, 6, 8, 9, 10, 11, 12, 13, 15, 17, 18, 19, 20, 21, 22 and 23 from the 5′-terminus of the antisense strand.

### Definitions

[0222] That the present disclosure may be more readily understood, certain terms are first defined. In addition, it should be noted that whenever a value or range of values of a parameter are recited, it is intended that values and ranges intermediate to the recited values are also intended to be part of this disclosure.

[0223] The articles “a” and “an” are used herein to refer to one or to more than one (i.e., to at least one) of the grammatical object of the article. By way of example, “an element” means one element or more than one element, e.g., a plurality of elements.

[0224] The term “including” is used herein to mean, and is used interchangeably with, the phrase “including but not limited to”.

[0225] The term “or” is used herein to mean, and is used interchangeably with, the term “and/or,” unless context clearly indicates otherwise.

[0226] The term “about” is used herein to mean within the typical ranges of tolerances in the art. For example, “about” can be understood as about 2 standard deviations from the mean. In certain embodiments, about means ±10%. In certain embodiments, about means ±5%. When about is present before a series of numbers or a range, it is understood that “about” can modify each of the numbers in the series or range.

[0227] The term “at least” prior to a number or series of numbers is understood to include the number adjacent to the term “at least”, and all subsequent numbers or integers that could logically be included, as clear from context. For example, the number of nucleotides in a nucleic acid molecule must be an integer. For example, “at least 18 nucleotides of a 21 nucleotide nucleic acid molecule” means that 18, 19, 20, or 21 nucleotides have the indicated property. When at least is present before a series of numbers or a range, it is understood that “at least” can modify each of the numbers in the series or range.

[0228] As used herein, “no more than” or “less than” is understood as the value adjacent to the phrase and logical lower values or integers, as logical from context, to zero. For example, a duplex with an overhang of “no more than 2 nucleotides” has a 2, 1, or 0 nucleotide overhang. When “no more than” is present before a series of numbers or a range, it is understood that “no more than” can modify each of the numbers in the series or range. As used herein, ranges include both the upper and lower limit.

[0229] As used herein, methods of detection can include determination that the amount of analyte present is below the level of detection of the method.

[0230] In the event of a conflict between an indicated target site and the nucleotide sequence for a sense or antisense strand, the indicated sequence takes precedence.

[0231] In the event of a conflict between a chemical structure and a chemical name, the chemical structure takes precedence.

[0232] The term “SNCA,” “α-synuclein,” “synuclein alpha,” or “alpha-synuclein,” refers to a gene associated with neurodegenerative diseases, termed “synucleinopathies,” as well as the proteins encoded by that gene. The human SNCA gene region covers approximately 114 kb. The SNCA transcript contains 13 exons, and 15 mRNA isoforms have been identified or otherwise predicted as produced. Nucleotide and amino acid sequences of SNCA may be found, for example, at GenBank Accession No. NM_007308.3 (Homo sapiens SNCA, SEQ ID NO: 1, reverse complement, SEQ ID NO: 2); GenBank Accession No. XM_005555421 (Macaca fascicularis SNCA, SEQ ID NO: 3, reverse complement, SEQ ID NO: 4); GenBank Accession No.: NM_009221 (Mus musculus SNCA, SEQ ID NO: 5, reverse complement, SEQ ID NO: 6); GenBank Accession No. NM_019169.2 (Rattus norvegicus SNCA, SEQ ID NO: 7, reverse complement, SEQ ID NO: 8); and GenBank Accession No. XM_535656.7 (Canis lupusfamiliaris SNCA, SEQ ID NO: 1806, reverse complement, SEQ ID NO: 3600).

[0233] The term “SNCA” as used herein also refers to variations of the SNCA gene including naturally occurring sequence variants provided, for example, isoform 1 transcript NM_000345.4 (SEQ ID NO: 1809), which encodes polypeptide NP_000336.1; isoform 2 transcript NM_001146054.2 (SEQ ID NO: 1807), which encodes polypeptide NP_001139526.1; isoform 3 transcript NM_001146055.2 (SEQ ID NO: 1808), which encodes polypeptide NP_001139527.1; isoform 4 transcript NM_007308.3 (SEQ ID NO: 1) as mentioned above, which encodes polypeptide NP_009292.1; isoform 5 transcript NM_001375285.1 (SEQ ID NO: 1810), which encodes polypeptide NP_001362214.1; isoform 6 transcript NM_001375286.1 (SEQ ID NO: 1811), which encodes polypeptide NP_001362215.1; isoform 7 transcript NM_001375287.1 (SEQ ID NO: 1812), which encodes polypeptide NP_001362216.1; isoform 8 transcript NM_001375288.1 (SEQ ID NO: 1813), which encodes polypeptide NP_001362217.1; isoform 9 transcript NM_001375290.1 (SEQ ID NO: 1814), which encodes polypeptide NP_001362219.1; as well as predicted isoform X1 transcript XM_011532203.1 (SEQ ID NO: 1815), which encodes polypeptide XP_011530505.1; predicted isoform X2 transcript XM_011532204.3 (SEQ ID NO: 1816), which encodes polypeptide XP_011530506.1; predicted isoform X3 transcript XM_011532205.2 (SEQ ID NO: 1817), which encodes polypeptide XP_011530507.1; predicted isoform X4 transcript XM_011532206.1 (SEQ ID NO: 1818), which encodes polypeptide XP_011530508.1; predicted isoform X5 transcript XM_011532207.1 (SEQ ID NO: 1819), which encodes polypeptide XP_011530509.1; and predicted isoform X8 transcript XM_017008563.1 (SEQ ID NO: 1820), which encodes polypeptide XP_016864052.1 (the unique sequence associated with each of the preceding Accession Numbers is incorporated herein by reference in the form available on the filing date of the instant application). Additional examples of SNCA sequences can be found in publicly available databases, for example, GenBank, OMIM, UniProt, NCBI dbSNP (see, e.g., www.ncbi.nlm.nih.gov/gene/6622), and the Macaca genome project web site (macaque.genomics.org.cn/page/species/index.jsp). Additional information on SNCA can be found, for example, at www.ncbi.nlm.nih.gov/gene/6622. The entire contents of each of the foregoing GenBank Accession numbers and the Gene database numbers are incorporated herein by reference as of the date of filing this application.

[0234] Three protein isoforms of α-synuclein have been described in UniProt. The longest α-synuclein isoform is an approximately 14 kDa protein (Isoform 1 UniProt, P37840 of 140 amino acids). Other α-synuclein isoforms in UniProt include: Isoform 2-4, P37840-2 of 112 amino acids; and Isoform 2-5, P37840-3 of 126 amino acids. The 140 amino acid α-Synuclein protein is encoded by 5 exon pairs mapping to chromosome loci 4q21.3-q22. The α-synuclein protein has an N-terminal region composed of incomplete KXKEGV motifs, an extremely hydrophobic NAC domain and a highly acidic C-terminal domain. At physiological conditions, SNCA is believed to be an intrinsically disordered monomer or helically folded tetramer. α-Synuclein composes 1% of all proteins in the cytosol of brain cells, and is predominantly expressed in the neocortex, hippocampus, substantia nigra, thalamus, and cerebellum. α-Synuclein is also expressed in lower amounts in the in heart, skeletal muscle and pancreas. Although the function of SNCA is not well understood, evidence suggests it plays an important role in maintaining an adequate supply of synaptic vesicles in presynaptic terminals. α-Synuclein is implicated in the regulation of dopamine release and transport, fibrillization of microtubule associated protein tau, and the regulation of a neuroprotective phenotype in non-dopaminergic neurons by regulating the inhibition of both p53 expression and transactivation of proapoptotic genes, leading to decreased caspase-3 activation. The primary mechanism by which α-synuclein induces neurodegenerative diseases such as Parkinson's, Lewy body dementia, and multiple system atrophy, appears to be elevated levels of the α-synuclein protein resulting in α-synuclein fibrillary aggregates.

[0235] As used herein, “target sequence” refers to a contiguous portion of the nucleotide sequence of an mRNA molecule formed during the transcription of a SNCA gene, including mRNA that is a product of RNA processing of a primary transcription product. In one embodiment, the target portion of the sequence will be at least long enough to serve as a substrate for RNAi-directed cleavage at or near that portion of the nucleotide sequence of an mRNA molecule formed during the transcription of a SNCA gene. In one embodiment, the target sequence is within the protein coding region of the SNCA gene. In another embodiment, the target sequence is within the 3′ UTR of the SNCA gene.

[0236] The target sequence may be from about 9-36 nucleotides in length, e.g., about 15-30 nucleotides in length. For example, the target sequence can be from about 15-30 nucleotides, 15-29, 15-28, 15-27, 15-26, 15-25, 15-24, 15-23, 15-22, 15-21, 15-20, 15-19, 15-18, 15-17, 18-30, 18-29, 18-28, 18-27, 18-26, 18-25, 18-24, 18-23, 18-22, 18-21, 18-20, 19-30, 19-29, 19-28, 19-27, 19-26, 19-25, 19-24, 19-23, 19-22, 19-21, 19-20, 20-30, 20-29, 20-28, 20-27, 20-26, 20-25, 20-24,20-23, 20-22, 20-21, 21-30, 21-29, 21-28, 21-27, 21-26, 21-25, 21-24, 21-23, or 21-22 nucleotides in length. In some embodiments, the target sequence is about 19 to about 30 nucleotides in length. In other embodiments, the target sequence is about 19 to about 25 nucleotides in length. In still other embodiments, the target sequence is about 19 to about 23 nucleotides in length. In some embodiments, the target sequence is about 21 to about 23 nucleotides in length. Ranges and lengths intermediate to the above recited ranges and lengths are also contemplated to be part of the disclosure.

[0237] As used herein, the term “strand comprising a sequence” refers to an oligonucleotide comprising a chain of nucleotides that is described by the sequence referred to using the standard nucleotide nomenclature.

[0238] “G,” “C,” “A,” “T”, and “U” each generally stand for a nucleotide that contains guanine, cytosine, adenine, thymidine, and uracil as a base, respectively in the context of a modified or unmodified nucleotide. However, it will be understood that the term “ribonucleotide” or “nucleotide” can also refer to a modified nucleotide, as further detailed below, or a surrogate replacement moiety (see, e.g., Table 1). The skilled person is well aware that guanine, cytosine, adenine, thymidine, and uracil can be replaced by other moieties without substantially altering the base pairing properties of an oligonucleotide comprising a nucleotide bearing such replacement moiety. For example, without limitation, a nucleotide comprising inosine as its base can base pair with nucleotides containing adenine, cytosine, or uracil. Hence, nucleotides containing uracil, guanine, or adenine can be replaced in the nucleotide sequences of dsRNA featured in the disclosure by a nucleotide containing, for example, inosine. In another example, adenine and cytosine anywhere in the oligonucleotide can be replaced with guanine and uracil, respectively to form G-U Wobble base pairing with the target mRNA. Sequences containing such replacement moieties are suitable for the compositions and methods featured in the disclosure.

[0239] The terms “iRNA”, “RNAi agent,” “iRNA agent,” “RNA interference agent” as used interchangeably herein, refer to an agent that contains RNA as that term is defined herein, and which mediates the targeted cleavage of an RNA transcript via an RNA-induced silencing complex (RISC) pathway. RNA interference (RNAi) is a process that directs the sequence-specific degradation of mRNA. RNAi modulates, e.g., inhibits, the expression of SNCA in a cell, e.g., a cell within a subject, such as a mammalian subject.

[0240] In one embodiment, an RNAi agent of the disclosure includes a single stranded RNAi that interacts with a target RNA sequence, e.g., a SNCA target mRNA sequence, to direct the cleavage of the target RNA. Without wishing to be bound by theory it is believed that long double stranded RNA introduced into cells is broken down into double-stranded short interfering RNAs (siRNAs) comprising a sense strand and an antisense strand by a Type III endonuclease known as Dicer (Sharp et al. (2001) Genes Dev. 15: 485). Dicer, a ribonuclease-III-like enzyme, processes these dsRNA into 19-23 base pair short interfering RNAs with characteristic two base 3′ overhangs (Bernstein, et al., (2001) Nature 409: 363). These siRNAs are then incorporated into an RNA-induced silencing complex (RISC) where one or more helicases unwind the siRNA duplex, enabling the complementary antisense strand to guide target recognition (Nykanen, et al., (2001) Cell 107: 309). Upon binding to the appropriate target mRNA, one or more endonucleases within the RISC cleave the target to induce silencing (Elbashir, et al., (2001) Genes Dev. 15: 188). Thus, in one aspect the disclosure relates to a single stranded RNA (ssRNA) (the antisense strand of a siRNA duplex) generated within a cell and which promotes the formation of a RISC complex to effect silencing of the target gene, i.e., a SNCA gene. Accordingly, the term “siRNA” is also used herein to refer to an RNAi as described above.

[0241] In another embodiment, the RNAi agent may be a single-stranded RNA that is introduced into a cell or organism to inhibit a target mRNA. Single-stranded RNAi agents bind to the RISC endonuclease, Argonaute 2, which then cleaves the target mRNA. The single-stranded siRNAs are generally 15-30 nucleotides and are chemically modified. The design and testing of single-stranded RNAs are described in U.S. Pat. No. 8,101,348 and in Lima et al., (2012) Cell 150: 883-894, the entire contents of each of which are hereby incorporated herein by reference. Any of the antisense nucleotide sequences described herein may be used as a single-stranded siRNA as described herein or as chemically modified by the methods described in Lima et al., (2012) Cell 150: 883-894.

[0242] In another embodiment, a “RNAi agent” for use in the compositions and methods of the disclosure is a double stranded RNA and is referred to herein as a “double stranded RNAi agent,” “double stranded RNA (dsRNA) molecule,” “dsRNA agent,” or “dsRNA”. The term “dsRNA” refers to a complex of ribonucleic acid molecules, having a duplex structure comprising two anti-parallel and substantially complementary nucleic acid strands, referred to as having “sense” and “antisense” orientations with respect to a target RNA, i.e., a SNCA gene. In some embodiments of the disclosure, a double stranded RNA (dsRNA) triggers the degradation of a target RNA, e.g., an mRNA, through a post-transcriptional gene-silencing mechanism referred to herein as RNA interference or RNAi.

[0243] In general, a dsRNA molecule can include ribonucleotides, but as described in detail herein, each or both strands can also include one or more non-ribonucleotides, e.g., a deoxyribonucleotide, a modified nucleotide. In addition, as used in this specification, an “RNAi agent” may include ribonucleotides with chemical modifications; an RNAi agent may include substantial modifications at multiple nucleotides.

[0244] As used herein, the term “modified nucleotide” refers to a nucleotide having, independently, a modified sugar moiety, a modified internucleotide linkage, or a modified nucleobase. Thus, the term modified nucleotide encompasses substitutions, additions or removal of, e.g., a functional group or atom, to internucleoside linkages, sugar moieties, or nucleobases. The modifications suitable for use in the agents of the disclosure include all types of modifications disclosed herein or known in the art. Any such modifications, as used in a siRNA type molecule, are encompassed by “RNAi agent” for the purposes of this specification and claims.

[0245] In certain embodiments of the instant disclosure, inclusion of a deoxy-nucleotide—which is acknowledged as a naturally occurring form of nucleotide—if present within an RNAi agent can be considered to constitute a modified nucleotide.

[0246] The duplex region may be of any length that permits specific degradation of a desired target RNA through a RISC pathway, and may range from about 9 to 36 base pairs in length, e.g., about 15-30 base pairs in length, for example, about 9, 10, 11, 12, 13, 14, 15, 16, 17, 18, 19, 20, 21, 22, 23, 24, 25, 26, 27, 28, 29, 30, 31, 32, 33, 34, 35, or 36 base pairs in length, such as about 15-30, 15-29, 15-28, 15-27, 15-26, 15-25, 15-24, 15-23, 15-22, 15-21, 15-20, 15-19, 15-18, 15-17, 18-30, 18-29, 18-28, 18-27, 18-26, 18-25, 18-24, 18-23, 18-22, 18-21, 18-20, 19-30, 19-29, 19-28, 19-27, 19-26, 19-25, 19-24, 19-23, 19-22, 19-21, 19-20, 20-30, 20-29, 20-28, 20-27, 20-26, 20-25, 20-24,20-23, 20-22, 20-21, 21-30, 21-29, 21-28, 21-27, 21-26, 21-25, 21-24, 21-23, or 21-22 base pairs in length. Ranges and lengths intermediate to the above recited ranges and lengths are also contemplated to be part of the invention.

[0247] The two strands forming the duplex structure may be different portions of one larger RNA molecule, or they may be separate RNA molecules. Where the two strands are part of one larger molecule, and therefore are connected by an uninterrupted chain of nucleotides between the 3′-end of one strand and the 5′-end of the respective other strand forming the duplex structure, the connecting RNA chain is referred to as a “hairpin loop.” A hairpin loop can comprise at least one unpaired nucleotide. In some embodiments, the hairpin loop can comprise at at least 4, at least 5, at least 6, at least 7, at least 8, at least 9, at least 10, at least 20, at least 23 or more unpaired nucleotides or nucleotides not directed to the target site of the dsRNA. In some embodiments, the hairpin loop can be 10 or fewer nucleotides. In some embodiments, the hairpin loop can be 8 or fewer unpaired nucleotides. In some embodiments, the hairpin loop can be 4-10 unpaired nucleotides. In some embodiments, the hairpin loop can be 4-8 nucleotides.

[0248] In certain embodiments, the two strands of double-stranded oligomeric compound can be linked together. The two strands can be linked to each other at both ends, or at one end only. By linking at one end is meant that 5′-end of first strand is linked to the 3′-end of the second strand or 3′-end of first strand is linked to 5′-end of the second strand. When the two strands are linked to each other at both ends, 5′-end of first strand is linked to 3′-end of second strand and 3′-end of first strand is linked to 5′-end of second strand. The two strands can be linked together by an oligonucleotide linker including, but not limited to, (N)n; wherein N is independently a modified or unmodified nucleotide and n is 3-23. In some embodiments, n is 3-10, e.g., 3, 4, 5, 6, 7, 8, 9, or 10. In some embodiments, the oligonucleotide linker is selected from the group consisting of GNRA, (G)4, (U)4, and (dT)4, wherein N is a modified or unmodified nucleotide and R is a modified or unmodified purine nucleotide. Some of the nucleotides in the linker can be involved in base-pair interactions with other nucleotides in the linker. The two strands can also be linked together by a non-nucleosidic linker, e.g. a linker described herein. It will be appreciated by one of skill in the art that any oligonucleotide chemical modifications or variations describe herein can be used in the oligonucleotide linker.

[0249] Hairpin and dumbbell type oligomeric compounds will have a duplex region equal to or at least 14, 15, 15, 16, 17, 18, 19, 29, 21, 22, 23, 24, or 25 nucleotide pairs. The duplex region can be equal to or less than 200, 100, or 50, in length. In some embodiments, ranges for the duplex region are 15-30, 17 to 23, 19 to 23, and 19 to 21 nucleotides pairs in length.

[0250] The hairpin oligomeric compounds can have a single strand overhang or terminal unpaired region, in some embodiments at the 3′, and in some embodiments on the antisense side of the hairpin. In some embodiments, the overhangs are 1-4, more generally 2-3 nucleotides in length.

[0251] The hairpin oligomeric compounds that can induce RNA interference are also referred to as “shRNA” herein.

[0252] Where the two substantially complementary strands of a dsRNA are comprised by separate RNA molecules, those molecules need not, but can be covalently connected. Where the two strands are connected covalently by means other than an uninterrupted chain of nucleotides between the 3′-end of one strand and the 5′-end of the respective other strand forming the duplex structure, the connecting structure is referred to as a “linker.” The RNA strands may have the same or a different number of nucleotides. The maximum number of base pairs is the number of nucleotides in the shortest strand of the dsRNA minus any overhangs that are present in the duplex. In addition to the duplex structure, an RNAi may comprise one or more nucleotide overhangs.

[0253] In one embodiment, an RNAi agent of the disclosure is a dsRNA, each strand of which is 24-30 nucleotides in length, that interacts with a target RNA sequence, e.g., a SNCA target mRNA sequence, to direct the cleavage of the target RNA. Without wishing to be bound by theory, long double stranded RNA introduced into cells is broken down into siRNA by a Type III endonuclease known as Dicer (Sharp et al. (2001) Genes Dev. 15: 485). Dicer, a ribonuclease-III-like enzyme, processes the dsRNA into 19-23 base pair short interfering RNAs with characteristic two base 3′ overhangs (Bernstein, et al., (2001) Nature 409: 363). The siRNAs are then incorporated into an RNA-induced silencing complex (RISC) where one or more helicases unwind the siRNA duplex, enabling the complementary antisense strand to guide target recognition (Nykanen, et al., (2001) Cell 107: 309). Upon binding to the appropriate target mRNA, one or more endonucleases within the RISC cleave the target to induce silencing (Elbashir, et al., (2001) Genes Dev. 15: 188).

[0254] In one embodiment, an RNAi agent of the disclosure is a dsRNA agent, each strand of which comprises 19-23 nucleotides that interacts with a SNCA RNA sequence to direct the cleavage of the target RNA. Without wishing to be bound by theory, long double stranded RNA introduced into cells is broken down into siRNA by a Type III endonuclease known as Dicer (Sharp et al. (2001) Genes Dev. 15: 485). Dicer, a ribonuclease-III-like enzyme, processes the dsRNA into 19-23 base pair short interfering RNAs with characteristic two base 3′ overhangs (Bernstein, et al., (2001) Nature 409: 363). The siRNAs are then incorporated into an RNA-induced silencing complex (RISC) where one or more helicases unwind the siRNA duplex, enabling the complementary antisense strand to guide target recognition (Nykanen, et al., (2001) Cell 107: 309). Upon binding to the appropriate target mRNA, one or more endonucleases within the RISC cleave the target to induce silencing (Elbashir, et al., (2001) Genes Dev. 15: 188). In one embodiment, an RNAi agent of the disclosure is a dsRNA of 24-30 nucleotides that interacts with a SNCA RNA sequence to direct the cleavage of the target RNA.

[0255] As used herein, the term “nucleotide overhang” refers to at least one unpaired nucleotide that protrudes from the duplex structure of an RNAi agent, e.g., a dsRNA. For example, when a 3′-end of one strand of a dsRNA extends beyond the 5′-end of the other strand, or vice versa, there is a nucleotide overhang. A dsRNA can comprise an overhang of at least one nucleotide; alternatively, the overhang can comprise at least two nucleotides, at least three nucleotides, at least four nucleotides, at least five nucleotides or more. A nucleotide overhang can comprise or consist of a nucleotide/nucleoside analog, including a deoxynucleotide/nucleoside. The overhang(s) can be on the sense strand, the antisense strand or any combination thereof. Furthermore, the nucleotide(s) of an overhang can be present on the 5′-end, 3′-end or both ends of either an antisense or sense strand of a dsRNA.

[0256] In one embodiment of the dsRNA, at least one strand comprises a 3′ overhang of at least 1 nucleotide. In another embodiment, at least one strand comprises a 3′ overhang of at least 2 nucleotides, e.g., 2, 3, 4, 5, 6, 7, 9, 10, 11, 12, 13, 14, or 15 nucleotides. In other embodiments, at least one strand of the RNAi agent comprises a 5′ overhang of at least 1 nucleotide. In certain embodiments, at least one strand comprises a 5′ overhang of at least 2 nucleotides, e.g., 2, 3, 4, 5, 6, 7, 9, 10, 11, 12, 13, 14, or 15 nucleotides. In still other embodiments, both the 3′ and the 5′ end of one strand of the RNAi agent comprise an overhang of at least 1 nucleotide.

[0257] In one embodiment, the antisense strand of a dsRNA has a 1-10 nucleotide, e.g., 0-3, 1-3, 2-4, 2-5, 4-10, 5-10, e.g., a 1, 2, 3, 4, 5, 6, 7, 8, 9, or 10 nucleotide, overhang at the 3′-end, the 5′-end, at both ends, or at neither end. In one embodiment, the sense strand of a dsRNA has a 1-10 nucleotide, e.g., a 1, 2, 3, 4, 5, 6, 7, 8, 9, or 10 nucleotide, overhang at the 3′-end, the 5′-end, at both ends, or at neither end. In another embodiment, one or more of the nucleotides in the overhang is replaced with a nucleoside thiophosphate.

[0258] In certain embodiments, the overhang on the sense strand or the antisense strand, or both, can include extended lengths longer than 10 nucleotides, e.g., 1-30 nucleotides, 2-30 nucleotides, 10-30 nucleotides, or 10-15 nucleotides in length. In certain embodiments, an extended overhang is on the sense strand of the duplex. In certain embodiments, an extended overhang is present on the 3′end of the sense strand of the duplex. In certain embodiments, an extended overhang is present on the 5′end of the sense strand of the duplex. In certain embodiments, an extended overhang is on the antisense strand of the duplex. In certain embodiments, an extended overhang is present on the 3′end of the antisense strand of the duplex. In certain embodiments, an extended overhang is present on the 5′end of the antisense strand of the duplex. In certain embodiments, one or more of the nucleotides in the overhang is replaced with a nucleoside thiophosphate. In certain embodiments, the overhang includes a self-complementary portion such that the overhang is capable of forming a hairpin structure that is stable under physiological conditions.

[0259] The terms “blunt” or “blunt ended” as used herein in reference to a dsRNA mean that there are no unpaired nucleotides or nucleotide analogs at a given terminal end of a dsRNA, i.e., no nucleotide overhang. One or both ends of a dsRNA can be blunt. Where both ends of a dsRNA are blunt, the dsRNA is said to be blunt ended. To be clear, a “blunt ended” dsRNA is a dsRNA that is blunt at both ends, i.e., no nucleotide overhang at either end of the molecule. Most often such a molecule will be double stranded over its entire length.

[0260] The term “antisense strand” or “guide strand” refers to the strand of an RNAi agent, e.g., a dsRNA, which includes a region that is substantially complementary to a target sequence, e.g., a SNCA mRNA.

[0261] As used herein, the term “region of complementarity” refers to the region on the antisense strand that is substantially complementary to a sequence, for example a target sequence, e.g., a SNCA nucleotide sequence, as defined herein. Where the region of complementarity is not fully complementary to the target sequence, the mismatches can be in the internal or terminal regions of the molecule. Generally, the most tolerated mismatches are in the terminal regions, e.g., within 5, 4, 3, or 2 nucleotides of the 5′- or 3′-terminus of the RNAi agent.

[0262] In some embodiments, a double stranded RNA agent of the disclosure includes a nucleotide mismatch in the antisense strand.

[0263] In some embodiments, the antisense strand of the double stranded RNA agent of the disclosure includes no more than 4 mismatches with the target mRNA, e.g., the antisense strand includes 4, 3, 2, 1, or 0 mismatches with the target mRNA. In some embodiments, the antisense strand double stranded RNA agent of the disclosure includes no more than 4 mismatches with the sense strand, e.g., the antisense strand includes 4, 3, 2, 1, or 0 mismatches with the sense strand. In some embodiments, a double stranded RNA agent of the disclosure includes a nucleotide mismatch in the sense strand. In some embodiments, the sense strand of the double stranded RNA agent of the invention includes no more than 4 mismatches with the antisense strand, e.g., the sense strand includes 4, 3, 2, 1, or 0 mismatches with the antisense strand. In some embodiments, the nucleotide mismatch is, for example, within 5, 4, 3 nucleotides from the 3′-end of the iRNA. In another embodiment, the nucleotide mismatch is, for example, in the 3′-terminal nucleotide of the iRNA agent. In some embodiments, the mismatch(s) is not in the seed region.

[0264] Thus, an RNAi agent as described herein can contain one or more mismatches to the target sequence. In one embodiment, an RNAi agent as described herein contains no more than 3 mismatches (i.e., 3, 2, 1, or 0 mismatches). In one embodiment, an RNAi agent as described herein contains no more than 2 mismatches. In one embodiment, an RNAi agent as described herein contains no more than 1 mismatch. In one embodiment, an RNAi agent as described herein contains 0 mismatches. In certain embodiments, if the antisense strand of the RNAi agent contains mismatches to the target sequence, the mismatch can optionally be restricted to be within the last 5 nucleotides from either the 5′- or 3′-end of the region of complementarity. For example, in such embodiments, for a 23 nucleotide RNAi agent, the strand which is complementary to a region of a SNCA gene, generally does not contain any mismatch within the central 13 nucleotides. The methods described herein or methods known in the art can be used to determine whether an RNAi agent containing a mismatch to a target sequence is effective in inhibiting the expression of a SNCA gene. Consideration of the efficacy of RNAi agents with mismatches in inhibiting expression of a SNCA gene is important, especially if the particular region of complementarity in a SNCA gene is known to have polymorphic sequence variation within the population.

[0265] The term “sense strand” or “passenger strand” as used herein, refers to the strand of an RNAi agent that includes a region that is substantially complementary to a region of the antisense strand as that term is defined herein.

[0266] As used herein, “substantially all of the nucleotides are modified” are largely but not wholly modified and can include not more than 5, 4, 3, 2, or 1 unmodified nucleotides.

[0267] As used herein, the term “cleavage region” refers to a region that is located immediately adjacent to the cleavage site. The cleavage site is the site on the target at which cleavage occurs. In some embodiments, the cleavage region comprises three bases on either end of, and immediately adjacent to, the cleavage site. In some embodiments, the cleavage region comprises two bases on either end of, and immediately adjacent to, the cleavage site. In some embodiments, the cleavage site specifically occurs at the site bound by nucleotides 10 and 11 of the antisense strand, and the cleavage region comprises nucleotides 11, 12 and 13.

[0268] As used herein, and unless otherwise indicated, the term “complementary,” when used to describe a first nucleotide sequence in relation to a second nucleotide sequence, refers to the ability of an oligonucleotide or polynucleotide comprising the first nucleotide sequence to hybridize and form a duplex structure under certain conditions with an oligonucleotide or polynucleotide comprising the second nucleotide sequence, as will be understood by the skilled person. Such conditions can, for example, be stringent conditions, where stringent conditions can include: 400 mM NaCl, 40 mM PIPES pH 6.4, 1 mM EDTA, 50° C. or 70° C. for 12-16 hours followed by washing (see, e.g., “Molecular Cloning: A Laboratory Manual, Sambrook, et al. (1989) Cold Spring Harbor Laboratory Press). Other conditions, such as physiologically relevant conditions as can be encountered inside an organism, can apply. The skilled person will be able to determine the set of conditions most appropriate for a test of complementarity of two sequences in accordance with the ultimate application of the hybridized nucleotides.

[0269] Complementary sequences within an RNAi agent, e.g., within a dsRNA as described herein, include base-pairing of the oligonucleotide or polynucleotide comprising a first nucleotide sequence to an oligonucleotide or polynucleotide comprising a second nucleotide sequence over the entire length of one or both nucleotide sequences. Such sequences can be referred to as “fully complementary” with respect to each other herein. However, where a first sequence is referred to as “substantially complementary” with respect to a second sequence herein, the two sequences can be fully complementary, or they can form one or more, but generally not more than 5, 4, 3 or 2 mismatched base pairs upon hybridization for a duplex up to 30 base pairs, while retaining the ability to hybridize under the conditions most relevant to their ultimate application, e.g., inhibition of gene expression via a RISC pathway. However, where two oligonucleotides are designed to form, upon hybridization, one or more single stranded overhangs, such overhangs shall not be regarded as mismatches with regard to the determination of complementarity. For example, a dsRNA comprising one oligonucleotide 21 nucleotides in length and another oligonucleotide 23 nucleotides in length, wherein the longer oligonucleotide comprises a sequence of 21 nucleotides that is fully complementary to the shorter oligonucleotide, can yet be referred to as “fully complementary” for the purposes described herein.

[0270] “Complementary” sequences, as used herein, can also include, or be formed entirely from, non-Watson-Crick base pairs or base pairs formed from non-natural and modified nucleotides, in so far as the above requirements with respect to their ability to hybridize are fulfilled. Such non-Watson-Crick base pairs include, but are not limited to, G:U Wobble or Hoogstein base pairing.

[0271] The terms “complementary,” “fully complementary” and “substantially complementary” herein can be used with respect to the base matching between the sense strand and the antisense strand of a dsRNA, or between the antisense strand of an RNAi agent and a target sequence, as will be understood from the context of their use.

[0272] As used herein, a polynucleotide that is “substantially complementary to at least part of” a messenger RNA (mRNA) refers to a polynucleotide that is substantially complementary to a contiguous portion of the mRNA of interest (e.g., an mRNA encoding SNCA). For example, a polynucleotide is complementary to at least a part of a SNCA mRNA if the sequence is substantially complementary to a non-interrupted portion of an mRNA encoding SNCA.

[0273] Accordingly, in some embodiments, the antisense strand polynucleotides disclosed herein are fully complementary to the target SNCA sequence.

[0274] In certain embodiments, the antisense strand polynucleotides disclosed herein are substantially complementary to the target SNCA sequence and comprise a contiguous nucleotide sequence which is at least about 80% complementary over its entire length to the equivalent region of the nucleotide sequence of SEQ ID NOs: 1, 3, 5, or 7 for SNCA, or a fragment of SEQ ID NOs: 1, 3, 5, or 7, such as about 85%, about 86%, about 87%, about 88%, about 89%, about 90%, about 91%, about 92%, about 93%, about 94%, about 95%, about 96%, about 97%, about 98%, or about 99% complementary.

[0275] In other embodiments, the antisense polynucleotides disclosed herein are substantially complementary to the target SNCA sequence and comprise a contiguous nucleotide sequence which is at least about 80% complementary over its entire length to any one of the sense strand nucleotide sequences in Tables 2, 3, 12 or 13, or a fragment of any one of the sense strand nucleotide sequences in Tables 2, 3, 12 or 13, such as about 85%, about 86%, about 87%, about 88%, about 89%, about 90%, about 91%, about 92%, about 93%, about 94%, about 95%, about 96%, about 97%, about 98%, or about 99% complementary.

[0276] In one embodiment, an RNAi agent of the disclosure includes a sense strand that is substantially complementary to an antisense polynucleotide which, in turn, is the same as a target SNCA sequence, and wherein the sense strand polynucleotide comprises a contiguous nucleotide sequence which is at least about 80% complementary over its entire length to the equivalent region of the nucleotide sequence of SEQ ID NOs: 2, 4, 6, or 8, or a fragment of any one of SEQ ID NOs: 2, 4, 6, or 8, such as about 85%, about 86%, about 87%, about 88%, about 89%, about 90%, about 91%, about 92%, about 93%, about 94%, about 95%, about 96%, about 97%, about 98%, or about 99% complementary.

[0277] In some embodiments, an iRNA of the disclosure includes a sense strand that is substantially complementary to an antisense polynucleotide which, in turn, is complementary to a target SNCA sequence, and wherein the sense strand polynucleotide comprises a contiguous nucleotide sequence which is at least about 80% complementary over its entire length to any one of the antisense strand nucleotide sequences in Tables 2, 3, 12 or 13, or a fragment of any one of the antisense strand nucleotide sequences in Tables 2, 3, 12 or 13, such as about 85%, about 90%, about 91%, about 92%, about 93%, about 94%, about 95%, about 96%, about 97%, about 98%, about 99%, or 100% complementary

[0278] In some embodiments, the double-stranded region of a double-stranded iRNA agent is equal to or at least, 10, 11, 12, 13, 14, 15, 16, 17, 18, 19, 20, 21, 22, 23, 23, 24, 25, 26, 27, 28, 29, 30 or more nucleotide pairs in length.

[0279] In some embodiments, the antisense strand of a double-stranded iRNA agent is equal to or at least 14, 15, 16, 17, 18, 19, 20, 21, 22, 23, 23, 24, 25, 26, 27, 28, 29, or 30 nucleotides in length.

[0280] In some embodiments, the sense strand of a double-stranded iRNA agent is equal to or at least 10, 11, 12, 13, 14, 15, 16, 17, 18, 19, 20, 21, 22, 23, 23, 24, 25, 26, 27, 28, 29, or 30 nucleotides in length.

[0281] In one embodiment, the sense and antisense strands of the double-stranded iRNA agent are each 15 to 30 nucleotides in length.

[0282] In one embodiment, the sense and antisense strands of the double-stranded iRNA agent are each 19 to 25 nucleotides in length.

[0283] In one embodiment, the sense and antisense strands of the double-stranded iRNA agent are each 21 to 23 nucleotides in length.

[0284] In one embodiment, the sense strand of the iRNA agent is 21-nucleotides in length, and the antisense strand is 23-nucleotides in length, wherein the strands form a double-stranded region of 21 consecutive base pairs having a 2-nucleotide long single stranded overhangs at the 3′-end.

[0285] In some embodiments, the majority of nucleotides of each strand are ribonucleotides, but as described in detail herein, each or both strands can also include one or more non-ribonucleotides, e.g., a deoxyribonucleotide or a modified nucleotide. In addition, an “iRNA” may include ribonucleotides with chemical modifications. Such modifications may include all types of modifications disclosed herein or known in the art. Any such modifications, as used in an iRNA molecule, are encompassed by “iRNA” for the purposes of this specification and claims.

[0286] In one aspect of the disclosure, an agent for use in the methods and compositions of the disclosure is a single-stranded antisense nucleic acid molecule that inhibits a target mRNA via an antisense inhibition mechanism. The single-stranded antisense RNA molecule is complementary to a sequence within the target mRNA. The single-stranded antisense oligonucleotides can inhibit translation in a stoichiometric manner by base pairing to the mRNA and physically obstructing the translation machinery, see Dias, N. et al., (2002) Mol Cancer Ther 1: 347-355. The single-stranded antisense RNA molecule may be about 15 to about 30 nucleotides in length and have a sequence that is complementary to a target sequence. For example, the single-stranded antisense RNA molecule may comprise a sequence that is at least about 15, 16, 17, 18, 19, 20, or more contiguous nucleotides from any one of the antisense sequences described herein.

[0287] In one embodiment, at least partial suppression of the expression of a SNCA gene, is assessed by a reduction of the amount of SNCA mRNA which can be isolated from or detected in a first cell or group of cells in which a SNCA gene is transcribed and which has or have been treated such that the expression of a SNCA gene is inhibited, as compared to a second cell or group of cells substantially identical to the first cell or group of cells but which has or have not been so treated (control cells). The degree of inhibition may be expressed in terms of:

$$\frac{( mRNA in control cells ) - ( mRNA in treated cells )}{( mRNA in control cells )} \cdot 100 \%$$

[0288] The phrase “contacting a cell with an RNAi agent,” such as a dsRNA, as used herein, includes contacting a cell by any possible means. Contacting a cell with an RNAi agent includes contacting a cell in vitro with the RNAi agent or contacting a cell in vivo with the RNAi agent. The contacting may be done directly or indirectly. Thus, for example, the RNAi agent may be put into physical contact with the cell by the individual performing the method, or alternatively, the RNAi agent may be put into a situation that will permit or cause it to subsequently come into contact with the cell.

[0289] Contacting a cell in vitro may be done, for example, by incubating the cell with the RNAi agent. Contacting a cell in vivo may be done, for example, by injecting the RNAi agent into or near the tissue where the cell is located, or by injecting the RNAi agent into another area, e.g., the central nervous system (CNS), optionally via intrathecal, intravitreal or other injection, or to the bloodstream or the subcutaneous space, such that the agent will subsequently reach the tissue where the cell to be contacted is located. For example, the RNAi agent may contain or be coupled to a ligand, e.g., a lipophilic moiety or moieties as described below and further detailed, e.g., in PCT/US2019/031170, which is incorporated herein by reference, that directs or otherwise stabilizes the RNAi agent at a site of interest, e.g., the CNS. In some embodiments, the RNAi agent may contain or be coupled to a ligand, e.g., one or more GalNAc derivatives as described below, that directs or otherwise stabilizes the RNAi agent at a site of interest, e.g., the liver. In other embodiments, the RNAi agent may contain or be coupled to a lipophilic moiety or moieties and one or more GalNAc derivatives. Combinations of in vitro and in vivo methods of contacting are also possible. For example, a cell may also be contacted in vitro with an RNAi agent and subsequently transplanted into a subject.

[0290] In one embodiment, contacting a cell with an RNAi agent includes “introducing” or “delivering the RNAi agent into the cell” by facilitating or effecting uptake or absorption into the cell. Absorption or uptake of an RNAi agent can occur through unaided diffusive or active cellular processes, or by auxiliary agents or devices. Introducing an RNAi agent into a cell may be in vitro or in vivo. For example, for in vivo introduction, an RNAi agent can be injected into a tissue site or administered systemically. In vitro introduction into a cell includes methods known in the art such as electroporation and lipofection. Further approaches are described herein below or are known in the art.

[0291] The term “lipophile” or “lipophilic moiety” broadly refers to any compound or chemical moiety having an affinity for lipids. One way to characterize the lipophilicity of the lipophilic moiety is by the octanol-water partition coefficient, log K_{ow}, where K_{ow} is the ratio of a chemical's concentration in the octanol-phase to its concentration in the aqueous phase of a two-phase system at equilibrium. The octanol-water partition coefficient is a laboratory-measured property of a substance. However, it may also be predicted by using coefficients attributed to the structural components of a chemical which are calculated using first-principle or empirical methods (see, for example, Tetko et al., J. Chem. Inf. Comput. Sci. 41: 1407-21 (2001), which is incorporated herein by reference in its entirety). It provides a thermodynamic measure of the tendency of the substance to prefer a non-aqueous or oily milieu rather than water (i.e. its hydrophilic/lipophilic balance). In principle, a chemical substance is lipophilic in character when its log K_{ow} exceeds 0. Typically, the lipophilic moiety possesses a log K_{ow} exceeding 1, exceeding 1.5, exceeding 2, exceeding 3, exceeding 4, exceeding 5, or exceeding 10. For instance, the log K_{ow} of 6-amino hexanol, for instance, is predicted to be approximately 0.7. Using the same method, the log K_{ow} of cholesteryl N-(hexan-6-ol) carbamate is predicted to be 10.7.

[0292] The lipophilicity of a molecule can change with respect to the functional group it carries. For instance, adding a hydroxyl group or amine group to the end of a lipophilic moiety can increase or decrease the partition coefficient (e.g., log K_{ow}) value of the lipophilic moiety.

[0293] Alternatively, the hydrophobicity of the double-stranded RNAi agent, conjugated to one or more lipophilic moieties, can be measured by its protein binding characteristics. For instance, in certain embodiments, the unbound fraction in the plasma protein binding assay of the double-stranded RNAi agent could be determined to positively correlate to the relative hydrophobicity of the double-stranded RNAi agent, which could then positively correlate to the silencing activity of the double-stranded RNAi agent.

[0294] In one embodiment, the plasma protein binding assay determined is an electrophoretic mobility shift assay (EMSA) using human serum albumin protein. An exemplary protocol of this binding assay is illustrated in detail in, e.g., PCT/US2019/031170. The hydrophobicity of the double-stranded RNAi agent, measured by fraction of unbound siRNA in the binding assay, exceeds 0.15, exceeds 0.2, exceeds 0.25, exceeds 0.3, exceeds 0.35, exceeds 0.4, exceeds 0.45, or exceeds 0.5 for an enhanced in vivo delivery of siRNA.

[0295] Accordingly, conjugating the lipophilic moieties to the internal position(s) of the double-stranded RNAi agent provides optimal hydrophobicity for the enhanced in vivo delivery of siRNA.

[0296] The term “lipid nanoparticle” or “LNP” refers to a vesicle comprising a lipid layer encapsulating a pharmaceutically active molecule, such as a nucleic acid molecule, e.g., an RNAi agent or a plasmid from which an RNAi agent is transcribed. LNPs are described in, for example, U.S. Pat. Nos. 6,858,225, 6,815,432, 8,158,601, and 8,058,069, the entire contents of which are hereby incorporated herein by reference.

[0297] As used herein, a “subject” is an animal, such as a mammal, including a primate (such as a human, a non-human primate, e.g., a monkey, and a chimpanzee), or a non-primate (such as a a rat, or a mouse). In a preferred embodiment, the subject is a human, such as a human being treated or assessed for a disease, disorder, or condition that would benefit from reduction in SNCA expression; a human at risk for a disease, disorder, or condition that would benefit from reduction in SNCA expression; a human having a disease, disorder, or condition that would benefit from reduction in SNCA expression; or human being treated for a disease, disorder, or condition that would benefit from reduction in SNCA expression as described herein.

[0298] As used herein, the terms “treating” or “treatment” refer to a beneficial or desired result including, but not limited to, alleviation or amelioration of one or more signs or symptoms associated with SNCA gene expression or SNCA protein production, e.g., SNCA-associated neurodegenerative disease, e.g., synucleinopathies, such as PD, multiple system atrophy, Lewy body dementia (LBD), pure autonomic failure (PAF), Pick's disease, progressive supranuclear palsy, dementia pugilistica, parkinsonism linked to chromosome 17, Lytico-Bodig disease, tangle predominant dementia, Argyrophilic grain disease, ganglioglioma, gangliocytoma, meningioangiomatosis, subacute sclerosing panencephalitis, lead encephalopathy, tuberous sclerosis, Hallervorden-Spatz disease, lipofuscinosis, corticobasal degeneration, frontotemporal dementia, frontotemporal lobar degeneration, Alzheimer's disease, Huntington's disease, Down's syndrorne, psychosis, schizophrenia and Creutzfeldt-Jakob disease, decreased expression or activity of SNCA in regions of increased neuronal dysfunction or death, in subjects having such neurodegenerative diseases. “Treatment” can also mean prolonging survival as compared to expected survival in the absence of treatment.

[0299] The term “lower” in the context of the level of SNCA in a subject or a disease marker or symptom refers to a statistically significant decrease in such level. The decrease can be, for example, at least 10%, 15%, 20%, 25%, 30%, %, 40%, 45%, 50%, 55%, 60%, 65%, 70%, 75%, 80%, 85%, 90%, 95%, or more. In certain embodiments, a decrease is at least 20%. In certain embodiments, the decrease is at least 50% in a disease marker, e.g., protein or gene expression level. “Lower” in the context of the level of SNCA in a subject is optionally down to a level accepted as within the range of normal for an individual without such disorder. In certain embodiments, “lower” is the decrease in the difference between the level of a marker or symptom for a subject suffering from a disease and a level accepted within the range of normal for an individual, e.g., the level of decrease in speed of movement (bradykinesia) and ability to regulate posture and balance in an individual having Parkinson's and an individual not having Parkinson's or having symptoms that are within the range of normal.

[0300] As used herein, “prevention” or “preventing,” when used in reference to a disease or disorder, that would benefit from a reduction in expression of a SNCA gene or production of SNCA protein, e.g., in a subject susceptible to a SNCA-associated disorder due to, e.g., genetic factors or age, wherein the subject does not yet meet the diagnostic criteria for the SNCA-associated disorder. As used herein, prevention can be understood as administration of an agent to a subject who does not yet meet the diagnostic criteria for the SNCA-associated disorder to delay or reduce the likelihood that the subject will develop the SNCA-associated disorder. As the agent is a pharmaceutical agent, it is understood that administration typically would be under the direction of a health care professional capable of identifying a subject who does not yet meet the diagnostic criteria for a SNCA-associated disorder as being susceptible to developing a SNCA-associated disorder.

[0301] The term “synucleinopathies” refers to a group of neurodegenerative disorders characterized by fibrillary aggregates of α-synuclein protein that tend to accumulate in the cytoplasm of selective populations of neurons and glia. Synucleinopathies are therefore a class of SNCA-associated neurodegenerative diseases and disorders, which include Parkinson's disease (PD), Lewy body dementia (LBD), pure autonomic failure (PAF), and multiple system atrophy (MSA), among other neurodegenerative diseases. Clinically, synucleinopathies are characterized by a chronic and progressive decline in motor, cognitive, behavioral, and autonomic functions, depending on the distribution of the lesions in the brain. Because of clinical overlap, differential diagnosis is sometimes very difficult. Parkinsonism is the predominant symptom of PD, but it can be indistinguishable from the parkinsonism of LBD and MSA. Autonomic dysfunction, which is an isolated finding in PAF, may be present in PD and LBD, but is usually more prominent and appears earlier in MSA. LBD could be the same disease as PD but with widespread cortical pathological states, leading to dementia, fluctuating cognition, and the characteristic visual hallucinations.

[0302] The likelihood of developing a synucleinopathy, e.g., PD, LBD, etc., is reduced, for example, when an individual having one or more risk factors for PD or for LBD (or other synucleinopathy) either fails to develop PD or LBD (or other synucleinopathy) or develops PD or LBD (or other synucleinopathy) with less severity relative to a population having the same risk factors and not receiving treatment as described herein. The failure to develop a SNCA-associated disorder, e.g., PD or LBD (or other synucleinopathy), or a delay in the time to develop PD or LBD (or other synucleinopathy) by months or years is considered effective prevention. Prevention may require administration of more than one dose of the iRNA agent. Provided with appropriate methods to identify subjects at risk to develop any of the SNCA-associated diseases above, the iRNA agents provided herein can be used as pharmaceutical agents for or in methods of prevention of SNCA-associated diseases. Risk factors for various SNCA-associated diseases are discussed herein.

[0303] As used herein, the term “Parkinson's disease” or “PD” refers to a progressive nervous system disorder that affects movement. The main pathological characteristics of PD are cell death in the brain's basal ganglia (affecting up to 70% of the dopamine secreting neurons in the substantia nigra pars compacta by the end of life) and the presence of Lewy bodies (accumulations of the SNCA-encoded α-synuclein protein) in many of the remaining neurons. Symptoms start gradually, sometimes with a barely noticeable tremor in just one hand, or stiffness or slowing of movement. Other early symptoms include lack of facial expression, lack of arm movement while walking, and slurring during speech. Parkinson's disease symptoms worsen over time. The average onset of PD is age 60, and later onset is associated with greater symptom severity. Clinical features include, but are not limited to, more severe tremors, slowed movement (bradykinesia), rigid muscles, impaired posture and balance, loss of automatic movements, speech changes, and eventually, dementia, hallucinations, and wheelchair confinement.

[0304] As used herein, the term “Lewy body dementia (LBD)” refers to a type of progressive dementia that leads to a decline in thinking, reasoning and independent function caused by the aggregation of α-synuclein protein within diseased brain neurons, known as Lewy bodies and Lewy neurites. Aggregates of α-synuclein protein lead to sub-optimal functioning and eventual death of the affected neurons. Symptoms include visual, auditory, olfactory, or tactile hallucinations, signs of Parkinson's disease (parkinsonian signs), poor regulation of body functions (autonomic nervous system) such as dizziness, falls and bowel issues, cognitive problems such as confusion, poor attention, visual-spatial problems and memory loss, sleep difficulties such as rapid eye movement (REM) sleep behavior disorder (in which dreams are physically acted out while asleep), fluctuating attention including episodes of drowsiness, long periods of staring into space, long naps during the day or disorganized speech, depression, and apathy.

[0305] In one embodiment, a SNCA-associated disease or disorder (synucleinopathy) is one of Parkinson's disease, Lewy body dementia, multiple system atrophy (MSA), and pure autonomic failure (PAF).

[0306] “Therapeutically effective amount,” as used herein, is intended to include the amount of an RNAi agent that, when administered to a subject having a SNCA-associated disease, is sufficient to effect treatment of the disease (e.g., by diminishing, ameliorating, or maintaining the existing disease or one or more symptoms of disease). The “therapeutically effective amount” may vary depending on the RNAi agent, how the agent is administered, the disease and its severity and the history, age, weight, family history, genetic makeup, the types of preceding or concomitant treatments, if any, and other individual characteristics of the subject to be treated.

[0307] “Prophylactically effective amount,” as used herein, is intended to include the amount of an RNAi agent that, when administered to a subject having a SNCA-associated disorder, is sufficient to prevent or ameliorate the disease or one or more symptoms of the disease. Ameliorating the disease includes slowing the course of the disease or reducing the severity of later-developing disease. The “prophylactically effective amount” may vary depending on the RNAi agent, how the agent is administered, the degree of risk of disease, and the history, age, weight, family history, genetic makeup, the types of preceding or concomitant treatments, if any, and other individual characteristics of the patient to be treated.

[0308] A “therapeutically-effective amount” or “prophylactically effective amount” also includes an amount of an RNAi agent that produces some desired local or systemic effect at a reasonable benefit/risk ratio applicable to any treatment. An RNAi agent employed in the methods of the present disclosure may be administered in a sufficient amount to produce a reasonable benefit/risk ratio applicable to such treatment.

[0309] The phrase “pharmaceutically acceptable” is employed herein to refer to those compounds, materials, compositions, or dosage forms which are, within the scope of sound medical judgment, suitable for use in contact with the tissues of human subjects and animal subjects without excessive toxicity, irritation, allergic response, or other problem or complication, commensurate with a reasonable benefit/risk ratio.

[0310] The phrase “pharmaceutically-acceptable carrier” as used herein means a pharmaceutically-acceptable material, composition or vehicle, such as a liquid or solid filler, diluent, excipient, manufacturing aid (e.g., lubricant, talc magnesium, calcium or zinc stearate, or steric acid), or solvent encapsulating material, involved in carrying or transporting the subject compound from one organ, or portion of the body, to another organ, or portion of the body. Each carrier must be “acceptable” in the sense of being compatible with the other ingredients of the formulation and not injurious to the subject being treated. Some examples of materials which can serve as pharmaceutically-acceptable carriers include: (1) sugars, such as lactose, glucose and sucrose; (2) starches, such as corn starch and potato starch; (3) cellulose, and its derivatives, such as sodium carboxymethyl cellulose, ethyl cellulose and cellulose acetate; (4) powdered tragacanth; (5) malt; (6) gelatin; (7) lubricating agents, such as magnesium state, sodium lauryl sulfate and talc; (8) excipients, such as cocoa butter and suppository waxes; (9) oils, such as peanut oil, cottonseed oil, safflower oil, sesame oil, olive oil, corn oil and soybean oil; (10) glycols, such as propylene glycol; (11) polyols, such as glycerin, sorbitol, mannitol and polyethylene glycol; (12) esters, such as ethyl oleate and ethyl laurate; (13) agar; (14) buffering agents, such as magnesium hydroxide and aluminum hydroxide; (15) alginic acid; (16) pyrogen-free water; (17) isotonic saline; (18) Ringer's solution; (19) ethyl alcohol; (20) pH buffered solutions; (21) polyesters, polycarbonates or polyanhydrides; (22) bulking agents, such as polypeptides and amino acids (23) serum component, such as serum albumin, HDL and LDL; and (22) other non-toxic compatible substances employed in pharmaceutical formulations.

[0311] The term “sample,” as used herein, includes a collection of similar fluids, cells, or tissues isolated from a subject, as well as fluids, cells, or tissues present within a subject. Examples of biological fluids include blood, serum and serosal fluids, plasma, cerebrospinal fluid, ocular fluids, lymph, urine, saliva, and the like. Tissue samples may include samples from tissues, organs or localized regions. For example, samples may be derived from particular organs, parts of organs, or fluids or cells within those organs. In certain embodiments, samples may be derived from the brain (e.g., whole brain or certain segments of brain, e.g., striatum, or certain types of cells in the brain, such as, e.g., neurons and glial cells (astrocytes, oligodendrocytes, microglial cells)). In other embodiments, a “sample derived from a subject” refers to liver tissue (or subcomponents thereof) derived from the subject. In some embodiments, a “sample derived from a subject” refers to blood drawn from the subject or plasma or serum derived therefrom. In further embodiments, a “sample derived from a subject” refers to brain tissue (or subcomponents thereof) or retinal tissue (or subcomponents thereof) derived from the subject.

[0312] It will be understood that, although the sequences in Tables 2 or 12 are described as modified or conjugated sequences, the RNA of the RNAi agent of the disclosure e.g., a dsRNA of the disclosure, may comprise any one of the sequences set forth in Tables 2, 3, 12 or 13 that is un-modified, un-conjugated, or modified or conjugated differently than described therein. That is, the modified sequences provided in Tables 2 or 12 do not require the L96 ligand, or any ligand. A lipophilic ligand can be included in any of the positions provided in the instant application.

### BRIEF DESCRIPTION OF THE DRAWINGS

[0313] FIG. 1 shows the effects of selected SNCA-targeting RNAi agents on SNCA levels in human SNCA-AAV over-expressing mice. To identify RNA in vivo efficacy of the RNAi compounds in mice, a full-length human SNCA was first transduced by AAV. At 7 days post AAV-administration, the following selected duplexes were delivered: duplexes targeting the 3′UTR of human SNCA AD-464778, AD-464782, AD-464694, AD-464634, AD-464779; and duplexes targeting the coding sequence of SNCA AD-464590, AD-464313, AD-464314, AD-464585, AD-464586, AD-464592, and AD-464229. Data were normalized to PBS-treated samples.

[0314] FIG. 2 shows a schematic representation of the respective sequences and modification patterns of two selected SNCA-targeting RNAi duplexes: AD-464634 sense (SEQ ID NO: 924) and antisense (SEQ ID NO: 1016) strands, and AD-464314 sense (SEQ ID NO: 915) and antisense (SEQ ID NO: 1007) strands. Both duplexes were modified on antisense strands with a vinyl phosphate group and on sense strands with a triantennary GalNAc moiety (thereby promoting liver delivery). Indicated residues were also 2′ fluoro- or 2′-O-methyl-modified, and phosphorothioate internucleoside linkages were included at ultimate and penultimate linkages (both 3′ and 5′ ends for antisense strands, only 5′ end for sense strands), where shown.

[0315] FIG. 3 shows human SNCA knockdown results obtained in optimizing for in vivo activity of RNAi agents in huSNCA AAV-transformed mice (AAV incubation at 2e10 viral particles/mouse generated reliable data). Robust knockdown of human SNCA was observed in mice treated with both the huSNCA 3′-UTR-targeting AD-464634 duplex and the huSNCA coding sequence-targeting AD-464314 duplex, at both day 7 and day 14 time points. Dose-response was observed for both tested duplexes, particularly at the 14 day time point. With strong huSNCA knockdown observed even at the 14 day time point, both duplexes were identified as suitable for further in vivo lead development studies.

[0316] FIG. 4 shows human SNCA expression levels observed in liver tissue of huSNCA AAV-transduced mice (respectively huSNCA AAV-transduced with 2e10 or 2e11 viral particles), with huSNCA levels measured at days 7, 14 and 21.

[0317] FIG. 5 shows that mouse/rat cross-reactive duplexes inhibited rat SNCA in vivo when administered to rat SNCA-AAV-transduced mice. The selected RNAi agents included AD-476344, AD-475666, AD-476306, AD-476061, AD-464814, AD-475728, and AD-4644229. Data were normalized to PBS-treated samples.

[0318] FIG. 6 shows the strong correlation observed between measured SNCA knockdown levels in the hotspot walk of Table 14 and the calculated 1 nM fit values that were used to rank-order duplexes in Table 14.

[0319] The present invention is further illustrated by the following detailed description.

### DETAILED DESCRIPTION OF THE INVENTION

[0320] The present disclosure provides RNAi compositions, which effect the RNA-induced silencing complex (RISC)-mediated cleavage of RNA transcripts of a SNCA gene. The SNCA gene may be within a cell, e.g., a cell within a subject, such as a human. The present disclosure also provides methods of using the RNAi compositions of the disclosure for inhibiting the expression of a SNCA gene or for treating a subject having a disorder that would benefit from inhibiting or reducing the expression of a SNCA gene, e.g., a SNCA-associated disease, e.g., a synucleinopathy, such as PD, multiple system atrophy, Lewy body dementia (LBD), pure autonomic failure (PAF), Pick's disease, progressive supranuclear palsy, dementia pugilistica, parkinsonism linked to chromosome 17, Lytico-Bodig disease, tangle predominant dementia, Argyrophilic grain disease, ganglioglioma, gangliocytoma, meningioangiomatosis, subacute sclerosing panencephalitis, lead encephalopathy, tuberous sclerosis, Hallervorden-Spatz disease, lipofuscinosis, corticobasal degeneration, frontotemporal dementia, frontotemporal lobar degeneration, Alzheimer's disease, Huntington's disease, Down's syndrome, psychosis, schizophrenia and Creutzfeldt-Jakob disease.

[0321] The RNAi agents of the disclosure include an RNA strand (the antisense strand) having a region which is about 30 nucleotides or less in length, e.g., 15-30, 15-29, 15-28, 15-27, 15-26, 15-25, 15-24, 15-23, 15-22, 15-21, 15-20, 15-19, 15-18, 15-17, 18-30, 18-29, 18-28, 18-27, 18-26, 18-25, 18-24, 18-23, 18-22, 18-21, 18-20, 19-30, 19-29, 19-28, 19-27, 19-26, 19-25, 19-24, 19-23, 19-22, 19-21, 19-20, 20-30, 20-29, 20-28, 20-27, 20-26, 20-25, 20-24, 20-23, 20-22, 20-21, 21-30, 21-29, 21-28, 21-27, 21-26, 21-25, 21-24, 21-23, or 21-22 nucleotides in length, which region is substantially complementary to at least part of an mRNA transcript of a SNCA gene. In certain embodiments, the RNAi agents of the disclosure include an RNA strand (the antisense strand) having a region which is about 21-23 nucleotides in length, which region is substantially complementary to at least part of an mRNA transcript of a SNCA gene.

[0322] In certain embodiments, the RNAi agents of the disclosure include an RNA strand (the antisense strand) which can include longer lengths, for example up to 66 nucleotides, e.g., 36-66, 26-36, 25-36, 31-60, 22-43, 27-53 nucleotides in length with a region of at least 19 contiguous nucleotides that is substantially complementary to at least a part of an mRNA transcript of a SNCA gene. These RNAi agents with the longer length antisense strands optionally include a second RNA strand (the sense strand) of 20-60 nucleotides in length wherein the sense and antisense strands form a duplex of 18-30 contiguous nucleotides.

[0323] The use of these RNAi agents enables the targeted degradation of mRNAs of a SNCA gene in mammals. Thus, methods and compositions including these RNAi agents are useful for treating a subject who would benefit by a reduction in the levels or activity of a SNCA protein, such as a subject having a SNCA-associated neurodegenerative disease, e.g. a synucleinopathy, such as PD, multiple system atrophy, Lewy body dementia (LBD), pure autonomic failure (PAF), Pick's disease, progressive supranuclear palsy, dementia pugilistica, parkinsonism linked to chromosome 17, Lytico-Bodig disease, tangle predominant dementia, Argyrophilic grain disease, ganglioglioma, gangliocytoma, meningioangiomatosis, subacute sclerosing panencephalitis, lead encephalopathy, tuberous sclerosis, Hallervorden-Spatz disease, lipofuscinosis, corticobasal degeneration, frontotemporal dementia, frontotemporal lobar degeneration, Alzheimer's disease, Huntington's disease, Down's syndrome, psychosis, schizophrenia and Creutzfeldt-Jakob disease.

[0324] Intraneuronal accumulation of α-synuclein has been described as either resulting in the formation of Lewy bodies, round eosinophilic hyaline 10-20 pm large inclusions, or Lewy neurites, elongated thread-like dystrophic axons and dendrites. In the PD brain, deposition of Lewy bodies and Lewy neurites are mostly limited to neurons connecting striatum with substantia nigra. These cells are crucial for the execution of movement and postural functions, explaining the nature of PD symptoms. In the LBD brain, widespread depositions of Lewy bodies and Lewy neurites are found both in midbrain and cortical areas.

[0325] α-Synuclein is a protein which is mainly found intraneuronally. Within the neuron, α-synuclein is predominantly located presynaptically and it has therefore been speculated that it plays a role in the regulation of synaptic activity. Three main isoforms of α-synuclein have been identified, of which the longest and most common form comprises 140 amino acids.

[0326] Oxidative stress has been implicated in a number of neurodegenerative disorders characterized by the pathological accumulation of misfolded α-synuclein. Various reactive oxygen species can induce peroxidation of lipids such as cellular membranes or lipoproteins and also result in the generation of highly reactive aldehydes from poly-unsaturated fatty acids (Yoritaka el al, 1996)

[0327] Brain pathology indicative of Alzheimer's disease (AD), i.e. amyloid plaques and neurofibrillary tangles, are seen in approximately 50% of cases with L3D. It is unclear whether the existence of parallel pathologies implies two different diseases or just represents a variant of each respective disorder. Sometimes the cases with co-pathology are described as having a Lewy body variant of AD (Hansen et al, 1990).

[0328] Research has also implicated a role of SNCA in AD and Down's syndrome, as the α-synuclein protein has been demonstrated to accumulate in the limbic region in these disorders (Crews et al, 2009).

[0329] Rare dominantly inherited forms of PD and LBD can be caused by point mutations or duplications of the SNCA gene. The pathogenic mutations A30P and A53T (Kruger el al., 1998) (Polymeropoulos et al, 1998) and duplication of the gene (Chartier-Harlin et al, 2004) have been described to cause familial PD, whereas one other α-synuclein mutation, E46K (Zarranz el at, 2004) as well as triplication of the α-synuclein gene (Singleton et al., 2003) have been reported to cause either PD or LBD.

[0330] The pathogenic consequences of the α-synuclein mutations are only partly understood. However, in vitro data have shown that the A30P and A53T mutations increase the rate of aggregation (Conway et at, 2000), A broad range of differently composed α-synuclein species (monomers, dimers, oligomers, including protofibrils) are involved in the aggregation process, all of which may have different toxic properties. It is not clear which molecular species exert toxic effects in the brain. However, research has indicated that oligomeric forms of α-synuclein are particularly neurotoxic. Additional evidence for the role of oligomers is given by the observation that certain α-synuclein mutations (A:30P and A53T) causing hereditary Parkinson's disease, lead to an increased rate of oligomerization.

[0331] It is not completely known how the α-synuclein aggregation cascade begins. Possibly, an altered conformation of monomeric α-synuclein initiates formation of dimers and trimers, which continue to form higher soluble oligomers, including protofibrils, before these intermediately sized species are deposited as insoluble fibrils in Lewy bodies. It is also conceivable that the α-synuclein oligomers, once they are formed, can bind new monomers and/or smaller multimers of α-synuclein and hence accelerate the fibril formation process. Such seeding effects can possibly also occur in the extracellular space as some evidence suggests that α-synuclein pathology may propagate from neuron to neuron in the diseased brain.

[0332] The following detailed description discloses how to make and use compositions containing RNAi agents to inhibit the expression of a SNCA gene, as well as compositions and methods for treating subjects having diseases and disorders that would benefit from inhibition or reduction of the expression of the genes.

[0333] I. RNAi Agents of the Disclosure

[0334] Described herein are RNAi agents which inhibit the expression of a SNCA gene. In one embodiment, the RNAi agent includes double stranded ribonucleic acid (dsRNA) molecules for inhibiting the expression of a SNCA gene in a cell, such as a cell within a subject, e.g., a mammal, such as a human having a SNCA-associated neurodegenerative disease, e.g., a synucleinopathy, such as PD, multiple system atrophy, Lewy body dementia (LBD), pure autonomic failure (PAF), Pick's disease, progressive supranuclear palsy, dementia pugilistica, parkinsonism linked to chromosome 17, Lytico-Bodig disease, tangle predominant dementia, Argyrophilic grain disease, ganglioglioma, gangliocytoma, meningioangiomatosis, subacute sclerosing panencephalitis, lead encephalopathy, tuberous sclerosis, Hallervorden-Spatz disease, lipofuscinosis, corticobasal degeneration, frontotemporal dementia, frontotemporal lobar degeneration, Alzheimer's disease, Huntington's disease, Down's syndrome, psychosis, schizophrenia and Creutzfeldt-Jakob disease. The dsRNA includes an antisense strand having a region of complementarity which is complementary to at least a part of an mRNA formed in the expression of a SNCA gene. In embodiments, the region of complementarity is about 15-30 nucleotides or less in length. Upon contact with a cell expressing the SNCA gene, the RNAi agent inhibits the expression of the SNCA gene (e.g., a human gene, a primate gene, a non-primate gene) by at least 50% as assayed by, for example, a PCR or branched DNA (bDNA)-based method, or by a protein-based method, such as by immunofluorescence analysis, using, for example, western blotting or flow cytometric techniques.

[0335] A dsRNA includes two RNA strands that are complementary and hybridize to form a duplex structure under conditions in which the dsRNA will be used. One strand of a dsRNA (the antisense strand) includes a region of complementarity that is substantially complementary, and generally fully complementary, to a target sequence. The target sequence can be derived from the sequence of an mRNA formed during the expression of a SNCA gene. The other strand (the sense strand) includes a region that is complementary to the antisense strand, such that the two strands hybridize and form a duplex structure when combined under suitable conditions. As described elsewhere herein and as known in the art, the complementary sequences of a dsRNA can also be contained as self-complementary regions of a single nucleic acid molecule, as opposed to being on separate oligonucleotides.

[0336] Generally, the duplex structure is 15 to 30 base pairs in length, e.g., 15-29, 15-28, 15-27, 15-26, 15-25, 15-24, 15-23, 15-22, 15-21, 15-20, 15-19, 15-18, 15-17, 18-30, 18-29, 18-28, 18-27, 18-26, 18-25, 18-24, 18-23, 18-22, 18-21, 18-20, 19-30, 19-29, 19-28, 19-27, 19-26, 19-25, 19-24, 19-23, 19-22, 19-21, 19-20, 20-30, 20-29, 20-28, 20-27, 20-26, 20-25, 20-24, 20-23, 20-22, 20-21, 21-30, 21-29, 21-28, 21-27, 21-26, 21-25, 21-24, 21-23, or 21-22 base pairs in length. In certain preferred embodiments, the duplex structure is 18 to 25 base pairs in length, e.g., 18-25, 18-24, 18-23, 18-22, 18-21, 18-20, 19-25, 19-24, 19-23, 19-22, 19-21, 19-20, 20-25, 20-24, 20-23, 20-22, 20-21, 21-25, 21-24, 21-23, 21-22, 22-25, 22-24, 22-23, 23-25, 23-24 or 24-25 base pairs in length, for example, 19-21 base pairs in length. Ranges and lengths intermediate to the above recited ranges and lengths are also contemplated to be part of the disclosure.

[0337] Similarly, the region of complementarity to the target sequence is 15 to 30 nucleotides in length, e.g., 15-29, 15-28, 15-27, 15-26, 15-25, 15-24, 15-23, 15-22, 15-21, 15-20, 15-19, 15-18, 15-17, 18-30, 18-29, 18-28, 18-27, 18-26, 18-25, 18-24, 18-23, 18-22, 18-21, 18-20, 19-30, 19-29, 19-28, 19-27, 19-26, 19-25, 19-24, 19-23, 19-22, 19-21, 19-20, 20-30, 20-29, 20-28, 20-27, 20-26, 20-25, 20-24, 20-23, 20-22, 20-21, 21-30, 21-29, 21-28, 21-27, 21-26, 21-25, 21-24, 21-23, or 21-22 nucleotides in length, for example 19-23 nucleotides in length or 21-23 nucleotides in length. Ranges and lengths intermediate to the above recited ranges and lengths are also contemplated to be part of the disclosure.

[0338] In some embodiments, the dsRNA is 15 to 23 nucleotides in length, or 24 to 30 nucleotides in length (optionally, 25 to 30 nucleotides in length). In general, the dsRNA can be long enough to serve as a substrate for the Dicer enzyme. For example, it is well known in the art that dsRNAs longer than about 21-23 nucleotides can serve as substrates for Dicer. As the ordinarily skilled person will also recognize, the region of an RNA targeted for cleavage will most often be part of a larger RNA molecule, often an mRNA molecule. Where relevant, a “part” of an mRNA target is a contiguous sequence of an mRNA target of sufficient length to allow it to be a substrate for RNAi-directed cleavage (i.e., cleavage through a RISC pathway).

[0339] One of skill in the art will also recognize that the duplex region is a primary functional portion of a dsRNA, e.g., a duplex region of about 15 to 36 base pairs, e.g., 15-36, 15-35, 15-34, 15-33, 15-32, 15-31, 15-30, 15-29, 15-28, 15-27, 15-26, 15-25, 15-24, 15-23, 15-22, 15-21, 15-20, 15-19, 15-18, 15-17, 18-30, 18-29, 18-28, 18-27, 18-26, 18-25, 18-24, 18-23, 18-22, 18-21, 18-20, 19-30, 19-29, 19-28, 19-27, 19-26, 19-25, 19-24, 19-23, 19-22, 19-21, 19-20, 20-30, 20-29, 20-28, 20-27, 20-26, 20-25, 20-24, 20-23, 20-22, 20-21, 21-30, 21-29, 21-28, 21-27, 21-26, 21-25, 21-24, 21-23, or 21-22 base pairs, for example, 19-21 base pairs. Thus, in one embodiment, to the extent that it becomes processed to a functional duplex, of e.g., 15-30 base pairs, that targets a desired RNA for cleavage, an RNA molecule or complex of RNA molecules having a duplex region greater than 30 base pairs is a dsRNA. Thus, an ordinarily skilled artisan will recognize that in one embodiment, a miRNA is a dsRNA. In another embodiment, a dsRNA is not a naturally occurring miRNA. In another embodiment, an RNAi agent useful to target SNCA expression is not generated in the target cell by cleavage of a larger dsRNA.

[0340] A dsRNA as described herein can further include one or more single-stranded nucleotide overhangs e.g., 1, 2, 3, or 4 nucleotides. A nucleotide overhang can comprise or consist of a nucleotide/nucleoside analog, including a deoxynucleotide/nucleoside. The overhang(s) can be on the sense strand, the antisense strand or any combination thereof. Furthermore, the nucleotide(s) of an overhang can be present on the 5′-end, 3′-end or both ends of either an antisense or sense strand of a dsRNA. In certain embodiments, longer, extended overhangs are possible.

[0341] A dsRNA can be synthesized by standard methods known in the art as further discussed below, e.g., by use of an automated DNA synthesizer, such as are commercially available from, for example, Biosearch, Applied Biosystems, Inc.

[0342] iRNA compounds of the disclosure may be prepared using a two-step procedure. First, the individual strands of the double stranded RNA molecule are prepared separately. Then, the component strands are annealed. The individual strands of the siRNA compound can be prepared using solution-phase or solid-phase organic synthesis or both. Organic synthesis offers the advantage that the oligonucleotide strands comprising unnatural or modified nucleotides can be easily prepared. Single-stranded oligonucleotides of the disclosure can be prepared using solution-phase or solid-phase organic synthesis or both.

[0343] An siRNA can be produced, e.g., in bulk, by a variety of methods. Exemplary methods include: organic synthesis and RNA cleavage, e.g., in vitro cleavage.

[0344] An siRNA can be made by separately synthesizing a single stranded RNA molecule, or each respective strand of a double-stranded RNA molecule, after which the component strands can then be annealed.

[0345] A large bioreactor, e.g., the OligoPilot II from Pharmacia Biotec AB (Uppsala Sweden), can be used to produce a large amount of a particular RNA strand for a given siRNA. The OligoPilotII reactor can efficiently couple a nucleotide using only a 1.5 molar excess of a phosphoramidite nucleotide. To make an RNA strand, ribonucleotides amidites are used. Standard cycles of monomer addition can be used to synthesize the 21 to 23 nucleotide strand for the siRNA. Typically, the two complementary strands are produced separately and then annealed, e.g., after release from the solid support and deprotection.

[0346] Organic synthesis can be used to produce a discrete siRNA species. The complementary of the species to a SNCA gene can be precisely specified. For example, the species may be complementary to a region that includes a polymorphism, e.g., a single nucleotide polymorphism. Further the location of the polymorphism can be precisely defined. In some embodiments, the polymorphism is located in an internal region, e.g., at least 4, 5, 7, or 9 nucleotides from one or both of the termini.

[0347] In one embodiment, RNA generated is carefully purified to remove ends. iRNA is cleaved in vitro into siRNAs, for example, using a Dicer or comparable RNAse III-based activity. For example, the dsiRNA can be incubated in an in vitro extract from Drosophila or using purified components, e.g., a purified RNAse or RISC (RNA-induced silencing complex). See, e.g., Ketting et al. Genes Dev 2001 Oct. 15; 15(20): 2654-9 and Hammond Science 2001 Aug. 10; 293(5532): 1146-50.

[0348] dsiRNA cleavage generally produces a plurality of siRNA species, each being a particular 21 to 23 nt fragment of a source dsiRNA molecule. For example, siRNAs that include sequences complementary to overlapping regions and adjacent regions of a source dsiRNA molecule may be present.

[0349] Regardless of the method of synthesis, the siRNA preparation can be prepared in a solution (e.g., an aqueous or organic solution) that is appropriate for formulation. For example, the siRNA preparation can be precipitated and re-dissolved in pure double-distilled water, and lyophilized. The dried siRNA can then be resuspended in a solution appropriate for the intended formulation process.

[0350] In one aspect, a dsRNA of the disclosure includes at least two nucleotide sequences, a sense sequence and an antisense sequence. The sense strand sequence for SNCA may be selected from the group of sequences provided in Tables 2, 3, 12 or 13, and the corresponding nucleotide sequence of the antisense strand of the sense strand may be selected from the group of sequences in Tables 2, 3, 12 or 13. In this aspect, one of the two sequences is complementary to the other of the two sequences, with one of the sequences being substantially complementary to a sequence of an mRNA generated in the expression of a SNCA gene. As such, in this aspect, a dsRNA will include two oligonucleotides, where one oligonucleotide is described as the sense strand (passenger strand) in Tables 2, 3, 12 or 13, and the second oligonucleotide is described as the corresponding antisense strand (guide strand) of the sense strand in Tables 2, 3, 12 or 13 for SNCA.

[0351] In one embodiment, the substantially complementary sequences of the dsRNA are contained on separate oligonucleotides. In another embodiment, the substantially complementary sequences of the dsRNA are contained on a single oligonucleotide.

[0352] It will be understood that, although the sequences provided herein are described as modified or conjugated sequences, the RNA of the RNAi agent of the disclosure e.g., a dsRNA of the disclosure, may comprise any one of the sequences set forth in in Tables 2, 3, 12 or 13 that is un-modified, un-conjugated, or modified or conjugated differently than described therein. One or more lipophilic ligands or one or more GalNAc ligands can be included in any of the positions of the RNAi agents provided in the instant application.

[0353] The skilled person is well aware that dsRNAs having a duplex structure of about 20 to 23 base pairs, e.g., 21, base pairs have been hailed as particularly effective in inducing RNA interference (Elbashir et al., (2001) EMBO J., 20: 6877-6888). However, others have found that shorter or longer RNA duplex structures can also be effective (Chu and Rana (2007) RNA 14: 1714-1719; Kim et al. (2005) Nat Biotech 23: 222-226). In the embodiments described above, by virtue of the nature of the oligonucleotide sequences provided herein, dsRNAs described herein can include at least one strand of a length of minimally 21 nucleotides. It can be reasonably expected that shorter duplexes minus only a few nucleotides on one or both ends can be similarly effective as compared to the dsRNAs described above. Hence, dsRNAs having a sequence of at least 15, 16, 17, 18, 19, 20, or more contiguous nucleotides derived from one of the sequences provided herein, and differing in their ability to inhibit the expression of a SNCA gene by not more than 10, 15, 20, 25, or 30% inhibition from a dsRNA comprising the full sequence using the in vitro assay with Be(2)-C cells and a 10 nM concentration of the RNA agent and the PCR assay as provided in the examples herein, are contemplated to be within the scope of the present disclosure.

[0354] One benchmark assay for inhibition of SNCA involves contacting human Be(2)-C cells with a dsRNA agent as disclosed herein, where sufficient or effective SNCA inhibition is identified if at least 5% reduction, at least 10% reduction, at least 15% reduction, at least 20% reduction, at least 25% reduction, at least 30% reduction, at least 35% reduction, at least 40% reduction, at least 45% reduction, at least 50% reduction, at least 55% reduction, at least 60% reduction, at least 65% reduction, at least 70% reduction, at least 75% reduction, at least 80% reduction, at least 85% reduction, at least 90% reduction, at least 95% reduction, at least 97% reduction, at least 98% reduction, at least 99% reduction, or more of SNCA transcript or protein is observed in contacted cells, as compared to an appropriate control (e.g., cells not contacted with SNCA-targeting dsRNA). Optionally, a dsRNA agent of the disclosure is administered at 10 nM concentration, and the PCR assay is performed as provided in the examples herein (e.g., Example 2 below).

[0355] In addition, the RNAs described herein identify a site(s) in a SNCA transcript that is susceptible to RISC-mediated cleavage. As such, the present disclosure further features RNAi agents that target within this site(s). As used herein, an RNAi agent is said to target within a particular site of an RNA transcript if the RNAi agent promotes cleavage of the transcript anywhere within that particular site. Such an RNAi agent will generally include at least about 15 contiguous nucleotides, optionally at least 19 nucleotides, from one of the sequences provided herein coupled to additional nucleotide sequences taken from the region contiguous to the selected sequence in a SNCA gene.

[0356] An RNAi agent as described herein can contain one or more mismatches to the target sequence. In one embodiment, an RNAi agent as described herein contains no more than 3 mismatches (i.e., 3, 2, 1, or 0 mismatches). In one embodiment, an RNAi agent as described herein contains no more than 2 mismatches. In one embodiment, an RNAi agent as described herein contains no more than 1 mismatch. In one embodiment, an RNAi agent as described herein contains 0 mismatches. In certain embodiments, if the antisense strand of the RNAi agent contains mismatches to the target sequence, the mismatch can optionally be restricted to be within the last 5 nucleotides from either the 5′- or 3′-end of the region of complementarity. For example, in such embodiments, for a 23 nucleotide RNAi agent, the strand which is complementary to a region of a SNCA gene generally does not contain any mismatch within the central 13 nucleotides. The methods described herein or methods known in the art can be used to determine whether an RNAi agent containing a mismatch to a target sequence is effective in inhibiting the expression of a SNCA gene. Consideration of the efficacy of RNAi agents with mismatches in inhibiting expression of a SNCA gene is important, especially if the particular region of complementarity in a SNCA gene is known to have polymorphic sequence variation within the population.

[0357] II. Modified RNAi Agents of the Disclosure

[0358] In one embodiment, the RNA of the RNAi agent of the disclosure e.g., a dsRNA, is un-modified, and does not comprise, e.g., chemical modifications or conjugations known in the art and described herein. In preferred embodiments, the RNA of an RNAi agent of the disclosure, e.g., a dsRNA, is chemically modified to enhance stability or other beneficial characteristics. In certain embodiments of the disclosure, substantially all of the nucleotides of an RNAi agent of the disclosure are modified. In other embodiments of the disclosure, all of the nucleotides of an RNAi agent of the disclosure are modified. RNAi agents of the disclosure in which “substantially all of the nucleotides are modified” are largely but not wholly modified and can include not more than 5, 4, 3, 2, or 1 unmodified nucleotides. In still other embodiments of the disclosure, RNAi agents of the disclosure can include not more than 5, 4, 3, 2 or 1 modified nucleotides.

[0359] The nucleic acids featured in the disclosure can be synthesized or modified by methods well established in the art, such as those described in “Current protocols in nucleic acid chemistry,” Beaucage, S. L. et al. (Edrs.), John Wiley & Sons, Inc., New York, NY, USA, which is hereby incorporated herein by reference. Modifications include, for example, end modifications, e.g., 5′-end modifications (phosphorylation, conjugation, inverted linkages) or 3′-end modifications (conjugation, DNA nucleotides, inverted linkages, etc.); base modifications, e.g., replacement with stabilizing bases, destabilizing bases, or bases that base pair with an expanded repertoire of partners, removal of bases (abasic nucleotides), or conjugated bases; sugar modifications (e.g., at the 2′-position or 4′-position) or replacement of the sugar; or backbone modifications, including modification or replacement of the phosphodiester linkages. Specific examples of RNAi agents useful in the embodiments described herein include, but are not limited to, RNAs containing modified backbones or no natural internucleoside linkages. RNAs having modified backbones include, among others, those that do not have a phosphorus atom in the backbone. For the purposes of this specification, and as sometimes referenced in the art, modified RNAs that do not have a phosphorus atom in their internucleoside backbone can also be considered to be oligonucleosides. In some embodiments, a modified RNAi agent will have a phosphorus atom in its internucleoside backbone.

[0360] Modified RNA backbones include, for example, phosphorothioates, chiral phosphorothioates, phosphorodithioates, phosphotriesters, aminoalkylphosphotriesters, methyl and other alkyl phosphonates including 3′-alkylene phosphonates and chiral phosphonates, phosphinates, phosphoramidates including 3′-amino phosphoramidate and aminoalkylphosphoramidates, thionophosphoramidates, thionoalkylphosphonates, thionoalkylphosphotriesters, and boranophosphates having normal 3′-5′ linkages, 2′-5′-linked analogs of these, and those having inverted polarity wherein the adjacent pairs of nucleoside units are linked 3′-5′ to 5′-3′ or 2′-5′ to 5′-2′. Various salts, e.g., sodium salts, mixed salts and free acid forms are also included.

[0361] Representative U.S. patents that teach the preparation of the above phosphorus-containing linkages include, but are not limited to, U.S. Pat. Nos. 3,687,808; 4,469,863; 4,476,301; 5,023,243; 5,177,195; 5,188,897; 5,264,423; 5,276,019; 5,278,302; 5,286,717; 5,321,131; 5,399,676; 5,405,939; 5,453,496; 5,455,233; 5,466,677; 5,476,925; 5,519,126; 5,536,821; 5,541,316; 5,550,111; 5,563,253; 5,571,799; 5,587,361; 5,625,050; 6,028,188; 6,124,445; 6,160,109; 6,169,170; 6,172,209; 6,239,265; 6,277,603; 6,326,199; 6,346,614; 6,444,423; 6,531,590; 6,534,639; 6,608,035; 6,683,167; 6,858,715; 6,867,294; 6,878,805; 7,015,315; 7,041,816; 7,273,933; 7,321,029; and U.S. Pat. RE39464, the entire contents of each of which are hereby incorporated herein by reference.

[0362] Modified RNA backbones that do not include a phosphorus atom therein have backbones that are formed by short chain alkyl or cycloalkyl internucleoside linkages, mixed heteroatoms and alkyl or cycloalkyl internucleoside linkages, or one or more short chain heteroatomic or heterocyclic internucleoside linkages. These include those having morpholino linkages (formed in part from the sugar portion of a nucleoside); siloxane backbones; sulfide, sulfoxide and sulfone backbones; formacetyl and thioformacetyl backbones; methylene formacetyl and thioformacetyl backbones; alkene containing backbones; sulfamate backbones; methyleneimino and methylenehydrazino backbones; sulfonate and sulfonamide backbones; amide backbones; and others having mixed N, O, S and CH₂ component parts.

[0363] Representative U.S. patents that teach the preparation of the above oligonucleosides include, but are not limited to, U.S. Pat. Nos. 5,034,506; 5,166,315; 5,185,444; 5,214,134; 5,216,141; 5,235,033; 5,64,562; 5,264,564; 5,405,938; 5,434,257; 5,466,677; 5,470,967; 5,489,677; 5,541,307; 5,561,225; 5,596,086; 5,602,240; 5,608,046; 5,610,289; 5,618,704; 5,623,070; 5,663,312; 5,633,360; 5,677,437; and, 5,677,439, the entire contents of each of which are hereby incorporated herein by reference.

[0364] In other embodiments, suitable RNA mimetics are contemplated for use in RNAi agents, in which both the sugar and the internucleoside linkage, i.e., the backbone, of the nucleotide units are replaced with novel groups. The base units are maintained for hybridization with an appropriate nucleic acid target compound. One such oligomeric compound, an RNA mimetic that has been shown to have excellent hybridization properties, is referred to as a peptide nucleic acid (PNA). In PNA compounds, the sugar backbone of an RNA is replaced with an amide containing backbone, in particular an aminoethylglycine backbone. The nucleobases are retained and are bound directly or indirectly to aza nitrogen atoms of the amide portion of the backbone. Representative U.S. patents that teach the preparation of PNA compounds include, but are not limited to, U.S. Pat. Nos. 5,539,082; 5,714,331; and 5,719,262, the entire contents of each of which are hereby incorporated herein by reference. Additional PNA compounds suitable for use in the RNAi agents of the disclosure are described in, for example, in Nielsen et al., Science, 1991, 254, 1497-1500.

[0365] Some embodiments featured in the disclosure include RNAs with phosphorothioate backbones and oligonucleosides with heteroatom backbones, and in particular —CH₂—NH—CH₂—, —CH₂—N(CH₃)—O—CH₂—[known as a methylene (methylimino) or MMI backbone], —CH₂—O—N(CH₃)—CH₂—, —CH₂—N(CH₃)—N(CH₃)—CH₂— and —N(CH₃)—CH₂—CH₂—[wherein the native phosphodiester backbone is represented as —O—P—O—CH₂—] of the above-referenced U.S. Pat. No. 5,489,677, and the amide backbones of the above-referenced U.S. Pat. No. 5,602,240. In some embodiments, the RNAs featured herein have morpholino backbone structures of the above-referenced U.S. Pat. No. 5,034,506.

[0366] Modified RNAs can also contain one or more substituted sugar moieties. The RNAi agents, e.g., dsRNAs, featured herein can include one of the following at the 2′-position: OH; F; O-, S-, or N-alkyl; O-, S-, or N-alkenyl; O—, S- or N-alkynyl; or O-alkyl-O-alkyl, wherein the alkyl, alkenyl and alkynyl can be substituted or unsubstituted C₁ to C₁₀ alkyl or C2 to C₁₀ alkenyl and alkynyl. Exemplary suitable modifications include O[(CH₂)ₙO]ₘCH₃, O(CH₂)·ₙOCH₃, O(CH₂)ₙNH₂, O(CH₂)ₙCH₃, O(CH₂)ₙONH₂, and O(CH₂)ₙON[(CH₂)ₙCH₃)]₂, where n and m are from 1 to about 10. In other embodiments, dsRNAs include one of the following at the 2′ position: C₁ to C₁₀ lower alkyl, substituted lower alkyl, alkaryl, aralkyl, O-alkaryl or O-aralkyl, SH, SCH₃, OCN, Cl, Br, CN, CF₃, OCF₃, SOCH₃, SO₂CH₃, ONO₂, NO₂, N₃, NH₂, heterocycloalkyl, heterocycloalkaryl, aminoalkylamino, polyalkylamino, substituted silyl, an RNA cleaving group, a reporter group, an intercalator, a group for improving the pharmacokinetic properties of an RNAi agent, or a group for improving the pharmacodynamic properties of an RNAi agent, and other substituents having similar properties. In some embodiments, the modification includes a 2′-methoxyethoxy (2′-O—CH₂CH₂OCH₃, also known as 2′-O-(2-methoxyethyl) or 2′-MOE) (Martin et al., Helv. Chim. Acta, 1995, 78: 486-504) i.e., an alkoxy-alkoxy group. Another exemplary modification is 2′-dimethylaminooxyethoxy, i.e., a O(CH₂)₂ON(CH₃)₂ group, also known as 2′-DMAOE, as described in examples herein below, and 2′-dimethylaminoethoxyethoxy (also known in the art as 2′-O-dimethylaminoethoxyethyl or 2′-DMAEOE), i.e., 2′-O—CH₂—O—CH₂—N(CH₂)₂. Further exemplary modifications include: 5′-Me-2′-F nucleotides, 5′-Me-2′-OMe nucleotides, 5′-Me-2′-deoxynucleotides, (both R and S isomers in these three families); 2′-alkoxyalkyl; and 2′-NMA (N-methylacetamide).

[0367] Other modifications include 2′-methoxy (2′-OCH₃), 2′-aminopropoxy (2′-OCH₂CH₂CH₂NH₂), 2′-O-hexadecyl, and 2′-fluoro (2′-F). Similar modifications can also be made at other positions on the RNA of an RNAi agent, particularly the 3′ position of the sugar on the 3′ terminal nucleotide or in 2′-5′ linked dsRNAs and the 5′ position of 5′ terminal nucleotide. RNAi agents can also have sugar mimetics such as cyclobutyl moieties in place of the pentofuranosyl sugar. Representative U.S. patents that teach the preparation of such modified sugar structures include, but are not limited to, U.S. Pat. Nos. 4,981,957; 5,118,800; 5,319,080; 5,359,044; 5,393,878; 5,446,137; 5,466,786; 5,514,785; 5,519,134; 5,567,811; 5,576,427; 5,591,722; 5,597,909; 5,610,300; 5,627,053; 5,639,873; 5,646,265; 5,658,873; 5,670,633; and 5,700,920, certain of which are commonly owned with the instant application. The entire contents of each of the foregoing are hereby incorporated herein by reference.

[0368] An RNAi agent of the disclosure can also include nucleobase (often referred to in the art simply as “base”) modifications or substitutions. As used herein, “unmodified” or “natural” nucleobases include the purine bases adenine (A) and guanine (G), and the pyrimidine bases thymine (T), cytosine (C) and uracil (U). Modified nucleobases include other synthetic and natural nucleobases such as 5-methylcytosine (5-me-C), 5-hydroxymethyl cytosine, xanthine, hypoxanthine, 2-aminoadenine, 6-methyl and other alkyl derivatives of adenine and guanine, 2-propyl and other alkyl derivatives of adenine and guanine, 2-thiouracil, 2-thiothymine and 2-thiocytosine, 5-halouracil and cytosine, 5-propynyl uracil and cytosine, 6-azo uracil, cytosine and thymine, 5-uracil (pseudouracil), 4-thiouracil, 8-halo, 8-amino, 8-thiol, 8-thioalkyl, 8-hydroxyl anal other 8-substituted adenines and guanines, 5-halo, particularly 5-bromo, 5-trifluoromethyl and other 5-substituted uracils and cytosines, 7-methylguanine and 7-methyladenine, 8-azaguanine and 8-azaadenine, 7-deazaguanine and 7-daazaadenine and 3-deazaguanine and 3-deazaadenine. Further nucleobases include those disclosed in U.S. Pat. No. 3,687,808, those disclosed in Modified Nucleosides in Biochemistry, Biotechnology and Medicine, Herdewijn, P. ed. Wiley-VCH, 2008; those disclosed in The Concise Encyclopedia Of Polymer Science And Engineering, pages 858-859, Kroschwitz, J. L, ed. John Wiley & Sons, 1990, these disclosed by Englisch et al., (1991) Angewandte Chemie, International Edition, 30: 613, and those disclosed by Sanghvi, Y S., Chapter 15, dsRNA Research and Applications, pages 289-302, Crooke, S. T. and Lebleu, B., Ed., CRC Press, 1993. Certain of these nucleobases are particularly useful for increasing the binding affinity of the oligomeric compounds featured in the disclosure. These include 5-substituted pyrimidines, 6-azapyrimidines and N-2, N-6 and 0-6 substituted purines, including 2-aminopropyladenine, 5-propynyluracil and 5-propynylcytosine. 5-methylcytosine substitutions have been shown to increase nucleic acid duplex stability by 0.6-1.2° C. (Sanghvi, Y. S., Crooke, S. T. and Lebleu, B., Eds., dsRNA Research and Applications, CRC Press, Boca Raton, 1993, pp. 276-278) and are exemplary base substitutions, even more particularly when combined with 2′-O-methoxyethyl sugar modifications.

[0369] Representative U.S. patents that teach the preparation of certain of the above noted modified nucleobases as well as other modified nucleobases include, but are not limited to, the above noted U.S. Pat. Nos. 3,687,808, 4,845,205; 5,130,30; 5,134,066; 5,175,273; 5,367,066; 5,432,272; 5,457,187; 5,459,255; 5,484,908; 5,502,177; 5,525,711; 5,552,540; 5,587,469; 5,594,121, 5,596,091; 5,614,617; 5,681,941; 5,750,692; 6,015,886; 6,147,200; 6,166,197; 6,222,025; 6,235,887; 6,380,368; 6,528,640; 6,639,062; 6,617,438; 7,045,610; 7,427,672; and 7,495,088, the entire contents of each of which are hereby incorporated herein by reference.

[0370] An RNAi agent of the disclosure can also be modified to include one or more locked nucleic acids (LNA). A locked nucleic acid is a nucleotide having a modified ribose moiety in which the ribose moiety comprises an extra bridge connecting the 2′ and 4′ carbons. This structure effectively “locks” the ribose in the 3′-endo structural conformation. The addition of locked nucleic acids to siRNAs has been shown to increase siRNA stability in serum, and to reduce off-target effects (Elmen, J. et al., (2005) Nucleic Acids Research 33(1): 439-447; Mook, O R. et al., (2007) Mol Canc Ther 6(3): 833-843; Grunweller, A. et al., (2003) Nucleic Acids Research 31(12): 3185-3193).

[0371] An RNAi agent of the disclosure can also be modified to include one or more bicyclic sugar moities. A “bicyclic sugar” is a furanosyl ring modified by the bridging of two atoms. A “bicyclic nucleoside” (“BNA”) is a nucleoside having a sugar moiety comprising a bridge connecting two carbon atoms of the sugar ring, thereby forming a bicyclic ring system. In certain embodiments, the bridge connects the 4′-carbon and the 2′-carbon of the sugar ring. Thus, in some embodiments an agent of the disclosure may include one or more locked nucleic acids (LNA). A locked nucleic acid is a nucleotide having a modified ribose moiety in which the ribose moiety comprises an extra bridge connecting the 2′ and 4′ carbons. In other words, an LNA is a nucleotide comprising a bicyclic sugar moiety comprising a 4′-CH2-O-2′ bridge. This structure effectively “locks” the ribose in the 3′-endo structural conformation. The addition of locked nucleic acids to siRNAs has been shown to increase siRNA stability in serum, and to reduce off-target effects (Elmen, J. et al., (2005) Nucleic Acids Research 33(1): 439-447; Mook, O R. et al., (2007) Mol Canc Ther 6(3): 833-843; Grunweller, A. et al., (2003) Nucleic Acids Research 31(12): 3185-3193). Examples of bicyclic nucleosides for use in the polynucleotides of the disclosure include without limitation nucleosides comprising a bridge between the 4′ and the 2′ ribosyl ring atoms. In certain embodiments, the antisense polynucleotide agents of the disclosure include one or more bicyclic nucleosides comprising a 4′ to 2′ bridge. Examples of such 4′ to 2′ bridged bicyclic nucleosides, include but are not limited to 4′-(CH2) 0-2′ (LNA); 4′-(CH2)S-2′; 4′—(CH2)2-O-2′ (ENA); 4′-CH(CH3) 0-2′ (also referred to as “constrained ethyl” or “cEt”) and 4′-CH(CH2OCH3) 0-2′ (and analogs thereof, see, e.g., U.S. Pat. No. 7,399,845); 4′-C(CH3)(CH3) 0-2′ (and analogs thereof; see e.g., U.S. Pat. No. 8,278,283); 4′-CH2N(OCH3)-2′ (and analogs thereof; see e.g., U.S. Pat. No. 8,278,425); 4′-CH2-O—N(CH3)-2′ (see, e.g., U.S. Patent Publication No. 2004/0171570); 4′-CH2-N(R)—O-2′, wherein R is H, C1-C12 alkyl, or a protecting group (see, e.g., U.S. Pat. No. 7,427,672); 4′-CH2-C(H)(CH3)-2′ (see, e.g., Chattopadhyaya et al., J. Org. Chem., 2009, 74, 118-134); and 4′-CH2-C(═CH2)-2′ (and analogs thereof, see, e.g., U.S. Pat. No. 8,278,426). The entire contents of each of the foregoing are hereby incorporated herein by reference.

[0372] Additional representative US Patents and US Patent Publications that teach the preparation of locked nucleic acid nucleotides include, but are not limited to, the following: U.S. Pat. Nos. 6,268,490; 6,525,191; 6,670,461; 6,770,748; 6,794,499; 6,998,484; 7,053,207; 7,034,133; 7,084,125; 7,399,845; 7,427,672; 7,569,686; 7,741,457; 8,022,193; 8,030,467; 8,278,425; 8,278,426; 8,278,283; US 2008/0039618; and US 2009/0012281, the entire contents of each of which are hereby incorporated herein by reference.

[0373] Any of the foregoing bicyclic nucleosides can be prepared having one or more stereochemical sugar configurations including for example α-L-ribofuranose and 3-D-ribofuranose (see WO 99/14226).

[0374] An RNAi agent of the disclosure can also be modified to include one or more constrained ethyl nucleotides. As used herein, a “constrained ethyl nucleotide” or “cEt” is a locked nucleic acid comprising a bicyclic sugar moiety comprising a 4′-CH(CH3)-0-2′ bridge. In one embodiment, a constrained ethyl nucleotide is in the S conformation referred to herein as “S-cEt.”

[0375] An RNAi agent of the disclosure may also include one or more “conformationally restricted nucleotides” (“CRN”). CRN are nucleotide analogs with a linker connecting the C2′ and C4′ carbons of ribose or the C3′ and C5′ carbons of ribose. CRN lock the ribose ring into a stable conformation and increase the hybridization affinity to mRNA. The linker is of sufficient length to place the oxygen in an optimal position for stability and affinity resulting in less ribose ring puckering.

[0376] Representative publications that teach the preparation of certain of the above noted CRN include, but are not limited to, US 2013/0190383; and WO 2013/036868, the entire contents of each of which are hereby incorporated herein by reference.

[0377] In some embodiments, an RNAi agent of the disclosure comprises one or more monomers that are UNA (unlocked nucleic acid) nucleotides. UNA is unlocked acyclic nucleic acid, wherein any of the bonds of the sugar has been removed, forming an unlocked “sugar” residue. In one example, UNA also encompasses monomer with bonds between C1′—C4′ have been removed (i.e. the covalent carbon-oxygen-carbon bond between the C1′ and C4′ carbons). In another example, the C2′-C3′ bond (i.e. the covalent carbon-carbon bond between the C2′ and C3′ carbons) of the sugar has been removed (see Nuc. Acids Symp. Series, 52, 133-134 (2008) and Fluiter et al., Mol. Biosyst., 2009, 10, 1039 hereby incorporated by reference).

[0378] Representative U.S. publications that teach the preparation of UNA include, but are not limited to, U.S. Pat. No. 8,314,227; and US Patent Publication Nos. 2013/0096289; 2013/0011922; and 2011/0313020, the entire contents of each of which are hereby incorporated herein by reference.

[0379] Potentially stabilizing modifications to the ends of RNA molecules can include N-(acetylaminocaproyl)-4-hydroxyprolinol (Hyp-C6-NHAc), N-(caproyl-4-hydroxyprolinol (Hyp-C6), N-(acetyl-4-hydroxyprolinol (Hyp-NHAc), thymidine-2′-O-deoxythymidine (ether), N-(aminocaproyl)-4-hydroxyprolinol (Hyp-C6-amino), 2-docosanoyl-uridine-3″-phosphate, inverted base dT(idT) and others. Disclosure of this modification can be found in WO 2011/005861.

[0380] Other modifications of an RNAi agent of the disclosure include a 5′ phosphate or 5′ phosphate mimic, e.g., a 5′-terminal phosphate or phosphate mimic on the antisense strand of an RNAi agent. Suitable phosphate mimics are disclosed in, for example US 2012/0157511, the entire contents of which are incorporated herein by reference.

[0381] A. Modified RNAi Agents Comprising Motifs of the Disclosure

[0382] In certain aspects of the disclosure, the double-stranded RNAi agents of the disclosure include agents with chemical modifications as disclosed, for example, in WO 2013/075035, the entire contents of which are incorporated herein by reference. As shown herein and in WO 2013/075035, a superior result may be obtained by introducing one or more motifs of three identical modifications on three consecutive nucleotides into a sense strand or antisense strand of an RNAi agent, particularly at or near the cleavage site. In some embodiments, the sense strand and antisense strand of the RNAi agent may otherwise be completely modified. The introduction of these motifs interrupts the modification pattern, if present, of the sense or antisense strand. The RNAi agent may be optionally conjugated with a lipophilic ligand, e.g., a C16 ligand, for instance on the sense strand. The RNAi agent may be optionally modified with a (S)-glycol nucleic acid (GNA) modification, for instance on one or more residues of the antisense strand. The resulting RNAi agents present superior gene silencing activity.

[0383] Accordingly, the disclosure provides double stranded RNAi agents capable of inhibiting the expression of a target gene (i.e., a SNCA gene) in vivo. The RNAi agent comprises a sense strand and an antisense strand. Each strand of the RNAi agent may be 15-30 nucleotides in length. For example, each strand may be 16-30 nucleotides in length, 17-30 nucleotides in length, 25-30 nucleotides in length, 27-30 nucleotides in length, 17-23 nucleotides in length, 17-21 nucleotides in length, 17-19 nucleotides in length, 19-25 nucleotides in length, 19-23 nucleotides in length, 19-21 nucleotides in length, 21-25 nucleotides in length, or 21-23 nucleotides in length. In certain embodiments, each strand is 19-23 nucleotides in length.

[0384] The sense strand and antisense strand typically form a duplex double stranded RNA (“dsRNA”), also referred to herein as an “RNAi agent.” The duplex region of an RNAi agent may be 15-30 nucleotide pairs in length. For example, the duplex region can be 16-30 nucleotide pairs in length, 17-30 nucleotide pairs in length, 27-30 nucleotide pairs in length, 17-23 nucleotide pairs in length, 17-21 nucleotide pairs in length, 17-19 nucleotide pairs in length, 19-25 nucleotide pairs in length, 19-23 nucleotide pairs in length, 19-21 nucleotide pairs in length, 21-25 nucleotide pairs in length, or 21-23 nucleotide pairs in length. In another example, the duplex region is selected from 15, 16, 17, 18, 19, 20, 21, 22, 23, 24, 25, 26, and 27 nucleotides in length. In preferred embodiments, the duplex region is 19-21 nucleotide pairs in length.

[0385] In one embodiment, the RNAi agent may contain one or more overhang regions or capping groups at the 3′-end, 5′-end, or both ends of one or both strands. The overhang can be 1-6 nucleotides in length, for instance 2-6 nucleotides in length, 1-5 nucleotides in length, 2-5 nucleotides in length, 1-4 nucleotides in length, 2-4 nucleotides in length, 1-3 nucleotides in length, 2-3 nucleotides in length, or 1-2 nucleotides in length. In preferred embodiments, the nucleotide overhang region is 2 nucleotides in length. The overhangs can be the result of one strand being longer than the other, or the result of two strands of the same length being staggered. The overhang can form a mismatch with the target mRNA or it can be complementary to the gene sequences being targeted or can be another sequence. The first and second strands can also be joined, e.g., by additional bases to form a hairpin, or by other non-base linkers.

[0386] In one embodiment, the nucleotides in the overhang region of the RNAi agent can each independently be a modified or unmodified nucleotide including, but no limited to 2′-sugar modified, such as, 2′-F, 2′-O-methyl, thymidine (T), and any combinations thereof.

[0387] For example, TT can be an overhang sequence for either end on either strand. The overhang can form a mismatch with the target mRNA or it can be complementary to the gene sequences being targeted or can be another sequence.

[0388] The 5′- or 3′-overhangs at the sense strand, antisense strand or both strands of the RNAi agent may be phosphorylated. In some embodiments, the overhang region(s) contains two nucleotides having a phosphorothioate between the two nucleotides, where the two nucleotides can be the same or different. In one embodiment, the overhang is present at the 3′-end of the sense strand, antisense strand, or both strands. In one embodiment, this 3′-overhang is present in the antisense strand. In one embodiment, this 3′-overhang is present in the sense strand.

[0389] The RNAi agent may contain only a single overhang, which can strengthen the interference activity of the RNAi, without affecting its overall stability. For example, the single-stranded overhang may be located at the 3′-terminal end of the sense strand or, alternatively, at the 3′-terminal end of the antisense strand. The RNAi may also have a blunt end, located at the 5′-end of the antisense strand (or the 3′-end of the sense strand) or vice versa. Generally, the antisense strand of the RNAi has a nucleotide overhang at the 3′-end, and the 5′-end is blunt. While not wishing to be bound by theory, the asymmetric blunt end at the 5′-end of the antisense strand and 3′-end overhang of the antisense strand favor the guide strand loading into RISC process.

[0390] In one embodiment, the RNAi agent is a double ended bluntmer of 19 nucleotides in length, wherein the sense strand contains at least one motif of three 2′-F modifications on three consecutive nucleotides at positions 7, 8, 9 from the 5′end. The antisense strand contains at least one motif of three 2′-O-methyl modifications on three consecutive nucleotides at positions 11, 12, 13 from the 5′end.

[0391] In another embodiment, the RNAi agent is a double ended bluntmer of 20 nucleotides in length, wherein the sense strand contains at least one motif of three 2′-F modifications on three consecutive nucleotides at positions 8, 9, 10 from the 5′end. The antisense strand contains at least one motif of three 2′-O-methyl modifications on three consecutive nucleotides at positions 11, 12, 13 from the 5′end.

[0392] In yet another embodiment, the RNAi agent is a double ended bluntmer of 21 nucleotides in length, wherein the sense strand contains at least one motif of three 2′-F modifications on three consecutive nucleotides at positions 9, 10, 11 from the 5′end. The antisense strand contains at least one motif of three 2′-O-methyl modifications on three consecutive nucleotides at positions 11, 12, 13 from the 5′end.

[0393] In one embodiment, the RNAi agent comprises a 21 nucleotide sense strand and a 23 nucleotide antisense strand, wherein the sense strand contains at least one motif of three 2′-F modifications on three consecutive nucleotides at positions 9, 10, 11 from the 5′end; the antisense strand contains at least one motif of three 2′-O-methyl modifications on three consecutive nucleotides at positions 11, 12, 13 from the 5′end, wherein one end of the RNAi agent is blunt, while the other end comprises a 2 nucleotide overhang. Optionally, the 2 nucleotide overhang is at the 3′-end of the antisense strand. When the 2 nucleotide overhang is at the 3′-end of the antisense strand, there may be two phosphorothioate internucleotide linkages between the terminal three nucleotides, wherein two of the three nucleotides are the overhang nucleotides, and the third nucleotide is a paired nucleotide next to the overhang nucleotide. In one embodiment, the RNAi agent additionally has two phosphorothioate internucleotide linkages between the terminal three nucleotides at both the 5′-end of the sense strand and at the 5′-end of the antisense strand. In one embodiment, every nucleotide in the sense strand and the antisense strand of the RNAi agent, including the nucleotides that are part of the motifs are modified nucleotides. In one embodiment each residue is independently modified with a 2′-O-methyl or 3′-fluoro, e.g., in an alternating motif. Optionally, the RNAi agent further comprises a ligand (e.g., a lipophilic ligand, optionally a C16 ligand).

[0394] In one embodiment, the RNAi agent comprises a sense and an antisense strand, wherein the sense strand is 25-30 nucleotide residues in length, wherein starting from the 5′ terminal nucleotide (position 1) positions 1 to 23 of the first strand comprise at least 8 ribonucleotides; the antisense strand is 36-66 nucleotide residues in length and, starting from the 3′ terminal nucleotide, comprises at least 8 ribonucleotides in the positions paired with positions 1-23 of sense strand to form a duplex; wherein at least the 3′ terminal nucleotide of antisense strand is unpaired with sense strand, and up to 6 consecutive 3′ terminal nucleotides are unpaired with sense strand, thereby forming a 3′ single stranded overhang of 1-6 nucleotides; wherein the 5′ terminus of antisense strand comprises from 10-30 consecutive nucleotides which are unpaired with sense strand, thereby forming a 10-30 nucleotide single stranded 5′ overhang; wherein at least the sense strand 5′ terminal and 3′ terminal nucleotides are base paired with nucleotides of antisense strand when sense and antisense strands are aligned for maximum complementarity, thereby forming a substantially duplexed region between sense and antisense strands; and antisense strand is sufficiently complementary to a target RNA along at least 19 ribonucleotides of antisense strand length to reduce target gene expression when the double stranded nucleic acid is introduced into a mammalian cell; and wherein the sense strand contains at least one motif of three 2′-F modifications on three consecutive nucleotides, where at least one of the motifs occurs at or near the cleavage site. The antisense strand contains at least one motif of three 2′-O-methyl modifications on three consecutive nucleotides at or near the cleavage site.

[0395] In one embodiment, the RNAi agent comprises sense and antisense strands, wherein the RNAi agent comprises a first strand having a length which is at least 25 and at most 29 nucleotides and a second strand having a length which is at most 30 nucleotides with at least one motif of three 2′-O-methyl modifications on three consecutive nucleotides at position 11, 12, 13 from the 5′ end; wherein the 3′ end of the first strand and the 5′ end of the second strand form a blunt end and the second strand is 1-4 nucleotides longer at its 3′ end than the first strand, wherein the duplex region which is at least 25 nucleotides in length, and the second strand is sufficiently complementary to a target mRNA along at least 19 nucleotide of the second strand length to reduce target gene expression when the RNAi agent is introduced into a mammalian cell, and wherein dicer cleavage of the RNAi agent preferentially results in an siRNA comprising the 3′ end of the second strand, thereby reducing expression of the target gene in the mammal. Optionally, the RNAi agent further comprises a ligand.

[0396] In one embodiment, the sense strand of the RNAi agent contains at least one motif of three identical modifications on three consecutive nucleotides, where one of the motifs occurs at the cleavage site in the sense strand.

[0397] In one embodiment, the antisense strand of the RNAi agent can also contain at least one motif of three identical modifications on three consecutive nucleotides, where one of the motifs occurs at or near the cleavage site in the antisense strand.

[0398] For an RNAi agent having a duplex region of 17-23 nucleotide in length, the cleavage site of the antisense strand is typically around the 10, 11 and 12 positions from the 5′-end. Thus the motifs of three identical modifications may occur at the 9, 10, 11 positions; 10, 11, 12 positions; 11, 12, 13 positions; 12, 13, 14 positions; or 13, 14, 15 positions of the antisense strand, the count starting from the 1^{st} nucleotide from the 5′-end of the antisense strand, or, the count starting from the 1^{st} paired nucleotide within the duplex region from the 5′-end of the antisense strand. The cleavage site in the antisense strand may also change according to the length of the duplex region of the RNAi from the 5′-end.

[0399] The sense strand of the RNAi agent may contain at least one motif of three identical modifications on three consecutive nucleotides at the cleavage site of the strand; and the antisense strand may have at least one motif of three identical modifications on three consecutive nucleotides at or near the cleavage site of the strand. When the sense strand and the antisense strand form a dsRNA duplex, the sense strand and the antisense strand can be so aligned that one motif of the three nucleotides on the sense strand and one motif of the three nucleotides on the antisense strand have at least one nucleotide overlap, i.e., at least one of the three nucleotides of the motif in the sense strand forms a base pair with at least one of the three nucleotides of the motif in the antisense strand. Alternatively, at least two nucleotides may overlap, or all three nucleotides may overlap.

[0400] In one embodiment, the sense strand of the RNAi agent may contain more than one motif of three identical modifications on three consecutive nucleotides. The first motif may occur at or near the cleavage site of the strand and the other motifs may be a wing modification. The term “wing modification” herein refers to a motif occurring at another portion of the strand that is separated from the motif at or near the cleavage site of the same strand. The wing modification is either adjacent to the first motif or is separated by at least one or more nucleotides. When the motifs are immediately adjacent to each other, the chemistry of the motifs are distinct from each other; and when the motifs are separated by one or more nucleotide, the chemistries can be the same or different. Two or more wing modifications may be present. For instance, when two wing modifications are present, each wing modification may occur at one end relative to the first motif which is at or near cleavage site or on either side of the lead motif.

[0401] Like the sense strand, the antisense strand of the RNAi agent may contain more than one motif of three identical modifications on three consecutive nucleotides, with at least one of the motifs occurring at or near the cleavage site of the strand. This antisense strand may also contain one or more wing modifications in an alignment similar to the wing modifications that may be present on the sense strand.

[0402] In one embodiment, the wing modification on the sense strand or antisense strand of the RNAi agent typically does not include the first one or two terminal nucleotides at the 3′-end, 5′-end or both ends of the strand.

[0403] In another embodiment, the wing modification on the sense strand or antisense strand of the RNAi agent typically does not include the first one or two paired nucleotides within the duplex region at the 3′-end, 5′-end or both ends of the strand.

[0404] When the sense strand and the antisense strand of the RNAi agent each contain at least one wing modification, the wing modifications may fall on the same end of the duplex region, and have an overlap of one, two or three nucleotides.

[0405] When the sense strand and the antisense strand of the RNAi agent each contain at least two wing modifications, the sense strand and the antisense strand can be so aligned that two modifications each from one strand fall on one end of the duplex region, having an overlap of one, two or three nucleotides; two modifications each from one strand fall on the other end of the duplex region, having an overlap of one, two or three nucleotides; two modifications one strand fall on each side of the lead motif, having an overlap of one, two, or three nucleotides in the duplex region.

[0406] In one embodiment, the RNAi agent comprises mismatch(es) with the target, within the duplex, or combinations thereof. The mismatch may occur in the overhang region or the duplex region. The base pair may be ranked on the basis of their propensity to promote dissociation or melting (e.g., on the free energy of association or dissociation of a particular pairing, the simplest approach is to examine the pairs on an individual pair basis, though next neighbor or similar analysis can also be used). In terms of promoting dissociation: A:U is preferred over G:C; G:U is preferred over G:C; and I:C (I=inosine) is preferred over G:C. Mismatches, e.g., non-canonical or other than canonical pairings (as described elsewhere herein) are preferred over canonical (A:T, A:U, G:C) pairings; and pairings which include a universal base are preferred over canonical pairings.

[0407] In one embodiment, the RNAi agent comprises at least one of the first 1, 2, 3, 4, or 5 base pairs within the duplex regions from the 5′-end of the antisense strand independently selected from the group of: A:U, G:U, I:C, and mismatched pairs, e.g., non-canonical or other than canonical pairings or pairings which include a universal base, to promote the dissociation of the antisense strand at the 5′-end of the duplex.

[0408] In one embodiment, the nucleotide at the 1 position within the duplex region from the 5′-end in the antisense strand is selected from the group consisting of A, dA, dU, U, and dT. Alternatively, at least one of the first 1, 2 or 3 base pair within the duplex region from the 5′-end of the antisense strand is an AU base pair. For example, the first base pair within the duplex region from the 5′-end of the antisense strand is an AU base pair.

[0409] In another embodiment, the nucleotide at the 3′-end of the sense strand is deoxy-thymine (dT). In another embodiment, the nucleotide at the 3′-end of the antisense strand is deoxy-thymine (dT). In one embodiment, there is a short sequence of deoxy-thymine nucleotides, for example, two dT nucleotides on the 3′-end of the sense or antisense strand.

[0410] In one embodiment, the sense strand sequence may be represented by formula (I):

5′nₚ-Nₐ—(XXX)ᵢ-N_{b}—YYY—N_{b}—(ZZZ)ⱼ-Nₐ-n_{q}3′ (I)
[0411] wherein:
[0412] i and j are each independently 0 or 1;
[0413] p and q are each independently 0-6;
[0414] each Nₐ independently represents an oligonucleotide sequence comprising 0-25 modified nucleotides, each sequence comprising at least two differently modified nucleotides; each N_{b} independently represents an oligonucleotide sequence comprising 0-10 modified nucleotides;
[0415] each nₚ and n_{q} independently represent an overhang nucleotide;
[0416] wherein N_{b} and Y do not have the same modification; and
[0417] XXX, YYY and ZZZ each independently represent one motif of three identical modifications on three consecutive nucleotides. Optionally YYY is all 2′-F modified nucleotides.

[0418] In one embodiment, the Nₐ or N_{b} comprise modifications of alternating pattern.

[0419] In one embodiment, the YYY motif occurs at or near the cleavage site of the sense strand. For example, when the RNAi agent has a duplex region of 17-23 nucleotides in length, the YYY motif can occur at or the vicinity of the cleavage site (e.g.: can occur at positions 6, 7, 8, 7, 8, 9, 8, 9, 10, 9, 10, 11, 10, 11, 12 or 11, 12, 13) of—the sense strand, the count starting from the 1^{st} nucleotide, from the 5′-end; or optionally, the count starting at the 1^{st} paired nucleotide within the duplex region, from the 5′-end.

[0420] In one embodiment, i is 1 and j is 0, or i is 0 and j is 1, or both i and j are 1. The sense strand can therefore be represented by the following formulas:

5′nₚ-Nₐ—YYY—N_{b}—ZZZ—Nₐ-n_{q}3′ (Ib);

5′nₚ-Nₐ—XXX—N_{b}—YYY—Nₐ-n_{q}3′ (Ic); or

5′nₚ-Nₐ—XXX—N_{b}—YYY—N_{b}—ZZZ—Nₐ-n_{q}3′ (Id).

[0421] When the sense strand is represented by formula (Ib), N_{b} represents an oligonucleotide sequence comprising 0-10, 0-7, 0-5, 0-4, 0-2 or 0 modified nucleotides.

[0422] Each Nₐ independently can represent an oligonucleotide sequence comprising 2-20, 2-15, or 2-10 modified nucleotides.

[0423] When the sense strand is represented as formula (Ic), N_{b} represents an oligonucleotide sequence comprising 0-10, 0-7, 0-10, 0-7, 0-5, 0-4, 0-2 or 0 modified nucleotides. Each Nₐ can independently represent an oligonucleotide sequence comprising 2-20, 2-15, or 2-10 modified nucleotides.

[0424] When the sense strand is represented as formula (Id), each N_{b} independently represents an oligonucleotide sequence comprising 0-10, 0-7, 0-5, 0-4, 0-2 or 0 modified nucleotides. Optionally, N_{b} is 0, 1, 2, 3, 4, 5 or 6. Each Nₐ can independently represent an oligonucleotide sequence comprising 2-20, 2-15, or 2-10 modified nucleotides.

[0425] Each of X, Y and Z may be the same or different from each other.

[0426] In other embodiments, i is 0 and j is 0, and the sense strand may be represented by the formula:

5′nₚ-Nₐ—YYY—Nₐ-n_{q}3′ (Ia).

[0427] When the sense strand is represented by formula (Ia), each Nₐ independently can represent an oligonucleotide sequence comprising 2-20, 2-15, or 2-10 modified nucleotides.

[0428] In one embodiment, the antisense strand sequence of the RNAi may be represented by formula (II):

5′n_{q}′-Nₐ′—(Z′Z′Z′)ₖ—N_{b}′—Y′Y′Y′—N_{b}′—(X′X′X′)ₗ—N′ₐ-nₚ′3′ (II)
[0429] wherein:
[0430] k and l are each independently 0 or 1;
[0431] p′ and q′ are each independently 0-6;
   each Nₐ′ independently represents an oligonucleotide sequence comprising 0-25 modified nucleotides, each sequence comprising at least two differently modified nucleotides; each N_{b}′ independently represents an oligonucleotide sequence comprising 0-10 modified nucleotides;
   each nₚ′ and n_{q}′ independently represent an overhang nucleotide;
   wherein N_{b}′ and Y′ do not have the same modification;
   and
   X′X′X′, Y′Y′Y′ and Z′Z′Z′ each independently represent one motif of three identical modifications on three consecutive nucleotides.
   In one embodiment, the Nₐ‘ or N_{b}’ comprise modifications of alternating pattern.

[0432] The Y′Y′Y′ motif occurs at or near the cleavage site of the antisense strand. For example, when the RNAi agent has a duplex region of 17-23 nucleotidein length, the Y′Y′Y′ motif can occur at positions 9, 10, 11; 10, 11, 12; 11, 12, 13; 12, 13, 14; or 13, 14, 15 of the antisense strand, with the count starting from the 1^{st} nucleotide, from the 5′-end; or optionally, the count starting at the 1^{st} paired nucleotide within the duplex region, from the 5′-end. Optionally, the Y′Y′Y′ motif occurs at positions 11, 12, 13.

[0433] In one embodiment, Y′Y′Y′ motif is all 2′-OMe modified nucleotides.

[0434] In one embodiment, k is 1 and 1 is 0, or k is 0 and 1 is 1, or both k and l are 1.

[0435] The antisense strand can therefore be represented by the following formulas:

5′n_{q′}-Nₐ′—Z′Z′Z′—N_{b}′—Y′Y′Y′—Nₐ′-nₚ′3′ (IIb);

5′n_{q′}—Nₐ′—Y′Y′Y′—N_{b}′—X′X′X′-nₚ′3′ (IIc); or

5′n_{q′}—Nₐ′—Z′Z′Z′—N_{b}′—Y′Y′Y′—N_{b}′—X′X′X′—Nₐ′-nₚ′3′ (IId).

[0436] When the antisense strand is represented by formula (IIb), N_{b} represents an oligonucleotide sequence comprising 0-10, 0-7, 0-10, 0-7, 0-5, 0-4, 0-2 or 0 modified nucleotides. Each Nₐ′ independently represents an oligonucleotide sequence comprising 2-20, 2-15, or 2-10 modified nucleotides.

[0437] When the antisense strand is represented as formula (IIc), N_{b}′ represents an oligonucleotide sequence comprising 0-10, 0-7, 0-10, 0-7, 0-5, 0-4, 0-2 or 0 modified nucleotides. Each Nₐ′ independently represents an oligonucleotide sequence comprising 2-20, 2-15, or 2-10 modified nucleotides.

[0438] When the antisense strand is represented as formula (IId), each N_{b}′ independently represents an oligonucleotide sequence comprising 0-10, 0-7, 0-10, 0-7, 0-5, 0-4, 0-2 or 0 modified nucleotides. Each Nₐ′ independently represents an oligonucleotide sequence comprising 2-20, 2-15, or 2-10 modified nucleotides. Optionally, N_{b} is 0, 1, 2, 3, 4, 5 or 6.

[0439] In other embodiments, k is 0 and 1 is 0 and the antisense strand may be represented by the formula:

5′n_{p′}-N_{a′}—Y′Y′Y′—N_{a′}-n_{q′}3′ (Ia).

[0440] When the antisense strand is represented as formula (IIa), each Nₐ′ independently represents an oligonucleotide sequence comprising 2-20, 2-15, or 2-10 modified nucleotides.

[0441] Each of X′, Y′ and Z′ may be the same or different from each other.

[0442] Each nucleotide of the sense strand and antisense strand may be independently modified with LNA, HNA, CeNA, 2′-methoxyethyl, 2′-O-methyl, 2′-O-allyl, 2′-C-allyl, 2′-hydroxyl, or 2′-fluoro. For example, each nucleotide of the sense strand and antisense strand is independently modified with 2′-O-methyl or 2′-fluoro. Each X, Y, Z, X′, Y′ and Z′, in particular, may represent a 2′-O-methyl modification or a 2′-fluoro modification.

[0443] In one embodiment, the sense strand of the RNAi agent may contain YYY motif occurring at 9, 10 and 11 positions of the strand when the duplex region is 21 nt, the count starting from the 1^{st} nucleotide from the 5′-end, or optionally, the count starting at the 1^{st} paired nucleotide within the duplex region, from the 5′-end; and Y represents 2′-F modification. The sense strand may additionally contain XXX motif or ZZZ motifs as wing modifications at the opposite end of the duplex region; and XXX and ZZZ each independently represents a 2′-OMe modification or 2′-F modification.

[0444] In one embodiment the antisense strand may contain Y′Y′Y′ motif occurring at positions 11, 12, 13 of the strand, the count starting from the 1^{st} nucleotide from the 5′-end, or optionally, the count starting at the 1^{st} paired nucleotide within the duplex region, from the 5′-end; and Y′ represents 2′-O-methyl modification. The antisense strand may additionally contain X′X′X′ motif or Z′Z′Z′ motifs as wing modifications at the opposite end of the duplex region; and X′X′X′ and Z′Z′Z′ each independently represents a 2′-OMe modification or 2′-F modification.

[0445] The sense strand represented by any one of the above formulas (Ia), (Ib), (Ic), and (Id) forms a duplex with an antisense strand being represented by any one of formulas (IIa), (IIb), (IIc), and (IId), respectively.

[0446] Accordingly, the RNAi agents for use in the methods of the disclosure may comprise a sense strand and an antisense strand, each strand having 14 to 30 nucleotides, the RNAi duplex represented by formula (III):

sense: 5′nₚ-Nₐ—(XXX)ᵢ—N_{b}—YYY—N_{b}—(ZZZ)j-Nₐ-n_{q}3′ antisense: 3′nₚ′—Nₐ′—(X′X′X′)ₖ—N_{b}′—Y′Y′Y′—N_{b}′—(Z′Z′Z′)ₗ—Nₐ′-n_{q}′5′ (III)
[0447] wherein:
[0448] i, j, k, and 1 are each independently 0 or 1;
[0449] p, p′, q, and q′ are each independently 0-6;
[0450] each Nₐ and Nₐ′ independently represents an oligonucleotide sequence comprising 0-25 modified nucleotides, each sequence comprising at least two differently modified nucleotides;
[0451] each N_{b} and N_{b}′ independently represents an oligonucleotide sequence comprising 0-10 modified nucleotides;
[0452] wherein
[0453] each nₚ′, nₚ, n_{q}′, and n_{q}, each of which may or may not be present, independently represents an overhang nucleotide; and
[0454] XXX, YYY, ZZZ, X′X′X′, Y′Y′Y′, and Z′Z′Z′ each independently represent one motif of three identical modifications on three consecutive nucleotides.

[0455] In one embodiment, i is 0 and j is 0; or i is 1 and j is 0; or i is 0 and j is 1; or both i and j are 0; or both i and j are 1. In another embodiment, k is 0 and 1 is 0; or k is 1 and 1 is 0; k is 0 and 1 is 1; or both k and l are 0; or both k and l are 1.

[0456] Exemplary combinations of the sense strand and antisense strand forming an RNAi duplex include the formulas below:

5′nₚ-Nₐ—YYY—Nₐ-n_{q}3′ 3′nₚ′—Nₐ′—Y′Y′Y′—Nₐ′n_{q}′5′ (IIIa)

5′nₚ-Nₐ—YYY—N_{b}—ZZZ—Nₐ-n_{q}3′ 3′nₚ′—Nₐ′—Y′Y′Y′—N_{b}′—Z′Z′Z′—Nₐ′n_{q}′5′ (IIIb)

5′nₚ-Nₐ—XXX—N_{b}—YYY—Nₐ-n_{q}3′ 3′nₚ′—Nₐ′—X′X′X′—N_{b}′—Y′Y′Y′—Nₐ′-n_{q}′5′ (IIIc)

5′nₚ-Nₐ—XXX—N_{b}—YYY—N_{b}—ZZZ—Nₐ-n_{q}3′ 3′nₚ′—Nₐ′—X′X′X′—N_{b}′—Y′Y′Y′—N_{b}′—Z′Z′Z′—Nₐ-n_{q}′5′ (IIId)

[0457] When the RNAi agent is represented by formula (IIIa), each Nₐ independently represents an oligonucleotide sequence comprising 2-20, 2-15, or 2-10 modified nucleotides.

[0458] When the RNAi agent is represented by formula (IIIb), each N_{b} independently represents an oligonucleotide sequence comprising 1-10, 1-7, 1-5 or 1-4 modified nucleotides. Each Nₐ independently represents an oligonucleotide sequence comprising 2-20, 2-15, or 2-10 modified nucleotides.

[0459] When the RNAi agent is represented as formula (IIIc), each N_{b}, N_{b}′ independently represents an oligonucleotide sequence comprising 0-10, 0-7, 0-10, 0-7, 0-5, 0-4, 0-2 or 0 modified nucleotides. Each Nₐ independently represents an oligonucleotide sequence comprising 2-20, 2-15, or 2-10 modified nucleotides.

[0460] When the RNAi agent is represented as formula (IIId), each N_{b}, N_{b}′ independently represents an oligonucleotide sequence comprising 0-10, 0-7, 0-10, 0-7, 0-5, 0-4, 0-2 or 0 modified nucleotides. Each Nₐ, Nₐ′ independently represents an oligonucleotide sequence comprising 2-20, 2-15, or 2-10 modified nucleotides. Each of Nₐ, Nₐ′, N_{b} and N_{b}′ independently comprises modifications of alternating pattern.

[0461] In one embodiment, when the RNAi agent is represented by formula (IIId), the Nₐ modifications are 2′-O-methyl or 2′-fluoro modifications. In another embodiment, when the RNAi agent is represented by formula (IIId), the Nₐ modifications are 2′-O-methyl or 2′-fluoro modifications and nₚ′>0 and at least one nₚ′ is linked to a neighboring nucleotide a via phosphorothioate linkage. In yet another embodiment, when the RNAi agent is represented by formula (IIId), the Nₐ modifications are 2′-O-methyl or 2′-fluoro modifications, nₚ′>0 and at least one nₚ′ is linked to a neighboring nucleotide via phosphorothioate linkage, and the sense strand is conjugated to one or more C16 (or related) moieties attached through a bivalent or trivalent branched linker (described below). In another embodiment, when the RNAi agent is represented by formula (IIId), the Nₐ modifications are 2′-O-methyl or 2′-fluoro modifications, nₚ′>0 and at least one nₚ′ is linked to a neighboring nucleotide via phosphorothioate linkage, the sense strand comprises at least one phosphorothioate linkage, and the sense strand is conjugated to one or more lipophilic, e.g., C16 (or related) moieties, optionally attached through a bivalent or trivalent branched linker.

[0462] In one embodiment, when the RNAi agent is represented by formula (IIIa), the Nₐ modifications are 2′-O-methyl or 2′-fluoro modifications, nₚ′>0 and at least one nₚ′ is linked to a neighboring nucleotide via phosphorothioate linkage, the sense strand comprises at least one phosphorothioate linkage, and the sense strand is conjugated to one or more lipophilic, e.g., C16 (or related) moieties attached through a bivalent or trivalent branched linker.

[0463] In one embodiment, the RNAi agent is a multimer containing at least two duplexes represented by formula (III), (IIIa), (IIIb), (IIIc), and (IIId), wherein the duplexes are connected by a linker. The linker can be cleavable or non-cleavable. Optionally, the multimer further comprises a ligand. Each of the duplexes can target the same gene or two different genes; or each of the duplexes can target same gene at two different target sites.

[0464] In one embodiment, the RNAi agent is a multimer containing three, four, five, six or more duplexes represented by formula (III), (IIIa), (IIIb), (IIIc), and (IIId), wherein the duplexes are connected by a linker. The linker can be cleavable or non-cleavable. Optionally, the multimer further comprises a ligand. Each of the duplexes can target the same gene or two different genes; or each of the duplexes can target same gene at two different target sites.

[0465] In one embodiment, two RNAi agents represented by formula (III), (IIIa), (IIIb), (IIIc), and (IIId) are linked to each other at the 5′ end, and one or both of the 3′ ends and are optionally conjugated to a ligand. Each of the agents can target the same gene or two different genes; or each of the agents can target same gene at two different target sites.

[0466] Various publications describe multimeric RNAi agents that can be used in the methods of the disclosure. Such publications include WO2007/091269, WO2010/141511, WO2007/117686, WO2009/014887, and WO2011/031520; and U.S. Pat. No. 7,858,769, the entire contents of each of which are hereby incorporated herein by reference.

[0467] In certain embodiments, the compositions and methods of the disclosure include a vinyl phosphonate (VP) modification of an RNAi agent as described herein. In exemplary embodiments, a vinyl phosphonate of the disclosure has the following structure:

[chemical structure]

A vinyl phosphonate of the instant disclosure may be attached to either the antisense or the sense strand of a dsRNA of the disclosure. In certain preferred embodiments, a vinyl phosphonate of the instant disclosure is attached to the antisense strand of a dsRNA, optionally at the 5′ end of the antisense strand of the dsRNA.

[0468] Vinyl phosphate modifications are also contemplated for the compositions and methods of the instant disclosure. An exemplary vinyl phosphate structure is:

[chemical structure]

[0469] B. Thermally Destabilizing Modifications

[0470] In certain embodiments, a dsRNA molecule can be optimized for RNA interference by incorporating thermally destabilizing modifications in the seed region of the antisense strand (i.e., at positions 2-9 of the 5′-end of the antisense strand) to reduce or inhibit off-target gene silencing. It has been discovered that dsRNAs with an antisense strand comprising at least one thermally destabilizing modification of the duplex within the first 9 nucleotide positions, counting from the 5′ end, of the antisense strand have reduced off-target gene silencing activity. Accordingly, in some embodiments, the antisense strand comprises at least one (e.g., one, two, three, four, five or more) thermally destabilizing modification of the duplex within the first 9 nucleotide positions of the 5′ region of the antisense strand. In some embodiments, one or more thermally destabilizing modification(s) of the duplex is/are located in positions 2-9, or optionally positions 4-8, from the 5′-end of the antisense strand. In some further embodiments, the thermally destabilizing modification(s) of the duplex is/are located at position 6, 7 or 8 from the 5′-end of the antisense strand. In still some further embodiments, the thermally destabilizing modification of the duplex is located at position 7 from the 5′-end of the antisense strand. The term “thermally destabilizing modification(s)” includes modification(s) that would result with a dsRNA with a lower overall melting temperature (Tm) (optionally a Tm with one, two, three or four degrees lower than the Tm of the dsRNA without having such modification(s). In some embodiments, the thermally destabilizing modification of the duplex is located at position 2, 3, 4, 5 or 9 from the 5′-end of the antisense strand.

[0471] The thermally destabilizing modifications can include, but are not limited to, abasic modification; mismatch with the opposing nucleotide in the opposing strand; and sugar modification such as 2′-deoxy modification or acyclic nucleotide, e.g., unlocked nucleic acids (UNA) or glycol nucleic acid (GNA).

[0472] Exemplified abasic modifications include, but are not limited to the following:

[chemical structure]

### Wherein R=H, Me, Et or OMe; R′=H, Me, Et or OMe; R″=H, Me, Et or OMe

[chemical structure]

wherein B is a modified or unmodified nucleobase.

[0474] Exemplified sugar modifications include, but are not limited to the following:

[chemical structure]

2′-deoxy

[chemical structure]

unlocked nucleic acid
R = H, OH, O-alkyl

[chemical structure]

glycol nucleic acid
R = H, OH, O-alkyl

[chemical structure]

glycol nucleic acid
R = H, OH, O-alkyl

[chemical structure]

unlocked nucleic acid
R = H, OH, CH₃, CH₂CH₃, O-alkyl, NH₂, NHMe, NMe₂
R′ = H, OH, CH₃, CH₂CH₃, O-alkyl, NH₂, NHMe, NMe₂
R″ = H, OH, CH₃, CH₂CH₃, O-alkyl, NH₂, NHMe, NMe₂
R′′′ = H, OH, CH₃, CH₂CH₃, O-alkyl, NH₂, NHMe, NMe₂
R′′′′ = H, OH, CH₃, CH₂CH₃, O-alkyl, NH₂, NHMe, NMe₂

[chemical structure]

R = H, methyl, ethyl

wherein B is a modified or unmodified nucleobase.

[0475] In some embodiments the thermally destabilizing modification of the duplex is selected from the group consisting of:

[chemical structure]

wherein B is a modified or unmodified nucleobase and the asterisk on each structure represents either R, S or racemic.

[0476] The term “acyclic nucleotide” refers to any nucleotide having an acyclic ribose sugar, for example, where any of bonds between the ribose carbons (e.g., C1′-C2′, C2′-C3′, C3′-C4′, C4′-O4′, or C1′-O4′) is absent or at least one of ribose carbons or oxygen (e.g., C1′, C2′, C3′, C4′ or O4′) are independently or in combination absent from the nucleotide. In some embodiments, acyclic nucleotide is

[chemical structure]

wherein B is a modified or unmodified nucleobase, R¹ and R² independently are H, halogen, OR₃, or alkyl; and R₃ is H, alkyl, cycloalkyl, aryl, aralkyl, heteroaryl or sugar). The term “UNA” refers to unlocked acyclic nucleic acid, wherein any of the bonds of the sugar has been removed, forming an unlocked “sugar” residue. In one example, UNA also encompasses monomers with bonds between C1′—C4′ being removed (i.e. the covalent carbon-oxygen-carbon bond between the C1′ and C4′ carbons). In another example, the C2′-C3′ bond (i.e. the covalent carbon-carbon bond between the C2′ and C3′ carbons) of the sugar is removed (see Mikhailov et. al., Tetrahedron Letters, 26 (17): 2059 (1985); and Fluiter et al., Mol. Biosyst., 10: 1039 (2009), which are hereby incorporated by reference in their entirety). The acyclic derivative provides greater backbone flexibility without affecting the Watson-Crick pairings. The acyclic nucleotide can be linked via 2′-5′ or 3′-5′ linkage.

[0477] The term ‘GNA’ refers to glycol nucleic acid which is a polymer similar to DNA or RNA but differing in the composition of its “backbone” in that is composed of repeating glycerol units linked by phosphodiester bonds:

[chemical structure]

[0478] The thermally destabilizing modification of the duplex can be mismatches (i.e., noncomplementary base pairs) between the thermally destabilizing nucleotide and the opposing nucleotide in the opposite strand within the dsRNA duplex. Exemplary mismatch base pairs include G:G, G:A, G:U, G:T, A:A, A:C, C:C, C:U, C:T, U:U, T:T, U:T, or a combination thereof. Other mismatch base pairings known in the art are also amenable to the present disclosure. A mismatch can occur between nucleotides that are either naturally occurring nucleotides or modified nucleotides, i.e., the mismatch base pairing can occur between the nucleobases from respective nucleotides independent of the modifications on the ribose sugars of the nucleotides. In certain embodiments, the dsRNA molecule contains at least one nucleobase in the mismatch pairing that is a 2′-deoxy nucleobase; e.g., the 2′-deoxy nucleobase is in the sense strand.

[0479] In some embodiments, the thermally destabilizing modification of the duplex in the seed region of the antisense strand includes nucleotides with impaired W—C H-bonding to complementary base on the target mRNA, such as:

[chemical structure]

[0480] More examples of abasic nucleotide, acyclic nucleotide modifications (including UNA and GNA), and mismatch modifications have been described in detail in WO 2011/133876, which is herein incorporated by reference in its entirety.

The thermally destabilizing modifications may also include universal base with reduced or abolished capability to form hydrogen bonds with the opposing bases, and phosphate modifications.

[0481] In some embodiments, the thermally destabilizing modification of the duplex includes nucleotides with non-canonical bases such as, but not limited to, nucleobase modifications with impaired or completely abolished capability to form hydrogen bonds with bases in the opposite strand. These nucleobase modifications have been evaluated for destabilization of the central region of the dsRNA duplex as described in WO 2010/0011895, which is herein incorporated by reference in its entirety. Exemplary nucleobase modifications are:

[chemical structure]

[0482] In some embodiments, the thermally destabilizing modification of the duplex in the seed region of the antisense strand includes one or more α-nucleotide complementary to the base on the target mRNA, such as:

[chemical structure]

wherein R is H, OH, OCH3, F, NH₂, NHMe, NMe₂ or O-alkyl.

[0483] Exemplary phosphate modifications known to decrease the thermal stability of dsRNA duplexes compared to natural phosphodiester linkages are:

[chemical structure]

[0484] The alkyl for the R group can be a C1-C6 alkyl. Specific alkyls for the R group include, but are not limited to methyl, ethyl, propyl, isopropyl, butyl, pentyl and hexyl.

As the skilled artisan will recognize, in view of the functional role of nucleobases is defining specificity of an RNAi agent of the disclosure, while nucleobase modifications can be performed in the various manners as described herein, e.g., to introduce destabilizing modifications into an RNAi agent of the disclosure, e.g., for purpose of enhancing on-target effect relative to off-target effect, the range of modifications available and, in general, present upon RNAi agents of the disclosure tends to be much greater for non-nucleobase modifications, e.g., modifications to sugar groups or phosphate backbones of polyribonucleotides. Such modifications are described in greater detail in other sections of the instant disclosure and are expressly contemplated for RNAi agents of the disclosure, either possessing native nucleobases or modified nucleobases as described above or elsewhere herein.

[0485] In addition to the antisense strand comprising a thermally destabilizing modification, the dsRNA can also comprise one or more stabilizing modifications. For example, the dsRNA can comprise at least two (e.g., two, three, four, five, six, seven, eight, nine, ten or more) stabilizing modifications. Without limitations, the stabilizing modifications all can be present in one strand. In some embodiments, both the sense and the antisense strands comprise at least two stabilizing modifications. The stabilizing modification can occur on any nucleotide of the sense strand or antisense strand. For instance, the stabilizing modification can occur on every nucleotide on the sense strand or antisense strand; each stabilizing modification can occur in an alternating pattern on the sense strand or antisense strand; or the sense strand or antisense strand comprises both stabilizing modification in an alternating pattern. The alternating pattern of the stabilizing modifications on the sense strand may be the same or different from the antisense strand, and the alternating pattern of the stabilizing modifications on the sense strand can have a shift relative to the alternating pattern of the stabilizing modifications on the antisense strand.

[0486] In some embodiments, the antisense strand comprises at least two (e.g., two, three, four, five, six, seven, eight, nine, ten or more) stabilizing modifications. Without limitations, a stabilizing modification in the antisense strand can be present at any positions. In some embodiments, the antisense comprises stabilizing modifications at positions 2, 6, 8, 9, 14, and 16 from the 5′-end. In some other embodiments, the antisense comprises stabilizing modifications at positions 2, 6, 14, and 16 from the 5′-end. In still some other embodiments, the antisense comprises stabilizing modifications at positions 2, 14, and 16 from the 5′-end.

[0487] In some embodiments, the antisense strand comprises at least one stabilizing modification adjacent to the destabilizing modification. For example, the stabilizing modification can be the nucleotide at the 5′-end or the 3′-end of the destabilizing modification, i.e., at position −1 or +1 from the position of the destabilizing modification. In some embodiments, the antisense strand comprises a stabilizing modification at each of the 5′-end and the 3′-end of the destabilizing modification, i.e., positions −1 and +1 from the position of the destabilizing modification.

[0488] In some embodiments, the antisense strand comprises at least two stabilizing modifications at the 3′-end of the destabilizing modification, i.e., at positions +1 and +2 from the position of the destabilizing modification.

[0489] In some embodiments, the sense strand comprises at least two (e.g., two, three, four, five, six, seven, eight, nine, ten or more) stabilizing modifications. Without limitations, a stabilizing modification in the sense strand can be present at any positions. In some embodiments, the sense strand comprises stabilizing modifications at positions 7, 10, and 11 from the 5′-end. In some other embodiments, the sense strand comprises stabilizing modifications at positions 7, 9, 10, and 11 from the 5′-end. In some embodiments, the sense strand comprises stabilizing modifications at positions opposite or complimentary to positions 11, 12, and 15 of the antisense strand, counting from the 5′-end of the antisense strand. In some other embodiments, the sense strand comprises stabilizing modifications at positions opposite or complimentary to positions 11, 12, 13, and 15 of the antisense strand, counting from the 5′-end of the antisense strand. In some embodiments, the sense strand comprises a block of two, three, or four stabilizing modifications.

[0490] In some embodiments, the sense strand does not comprise a stabilizing modification in position opposite or complimentary to the thermally destabilizing modification of the duplex in the antisense strand.

[0491] Exemplary thermally stabilizing modifications include, but are not limited to, 2′-fluoro modifications. Other thermally stabilizing modifications include, but are not limited to, LNA.

[0492] In some embodiments, the dsRNA of the disclosure comprises at least four (e.g., four, five, six, seven, eight, nine, ten, or more) 2′-fluoro nucleotides. Without limitations, the 2′-fluoro nucleotides all can be present in one strand. In some embodiments, both the sense and the antisense strands comprise at least two 2′-fluoro nucleotides. The 2′-fluoro modification can occur on any nucleotide of the sense strand or antisense strand. For instance, the 2′-fluoro modification can occur on every nucleotide on the sense strand or antisense strand; each 2′-fluoro modification can occur in an alternating pattern on the sense strand or antisense strand; or the sense strand or antisense strand comprises both 2′-fluoro modifications in an alternating pattern. The alternating pattern of the 2′-fluoro modifications on the sense strand may be the same or different from the antisense strand, and the alternating pattern of the 2′-fluoro modifications on the sense strand can have a shift relative to the alternating pattern of the 2′-fluoro modifications on the antisense strand.

[0493] In some embodiments, the antisense strand comprises at least two (e.g., two, three, four, five, six, seven, eight, nine, ten, or more) 2′-fluoro nucleotides. Without limitations, a 2′-fluoro modification in the antisense strand can be present at any positions. In some embodiments, the antisense comprises 2′-fluoro nucleotides at positions 2, 6, 8, 9, 14, and 16 from the 5′-end. In some other embodiments, the antisense comprises 2′-fluoro nucleotides at positions 2, 6, 14, and 16 from the 5′-end. In still some other embodiments, the antisense comprises 2′-fluoro nucleotides at positions 2, 14, and 16 from the 5′-end.

[0494] In some embodiments, the antisense strand comprises at least one 2′-fluoro nucleotide adjacent to the destabilizing modification. For example, the 2′-fluoro nucleotide can be the nucleotide at the 5′-end or the 3′-end of the destabilizing modification, i.e., at position −1 or +1 from the position of the destabilizing modification. In some embodiments, the antisense strand comprises a 2′-fluoro nucleotide at each of the 5′-end and the 3′-end of the destabilizing modification, i.e., positions −1 and +1 from the position of the destabilizing modification.

[0495] In some embodiments, the antisense strand comprises at least two 2′-fluoro nucleotides at the 3′-end of the destabilizing modification, i.e., at positions +1 and +2 from the position of the destabilizing modification.

[0496] In some embodiments, the sense strand comprises at least two (e.g., two, three, four, five, six, seven, eight, nine, ten or more) 2′-fluoro nucleotides. Without limitations, a 2′-fluoro modification in the sense strand can be present at any positions. In some embodiments, the antisense comprises 2′-fluoro nucleotides at positions 7, 10, and 11 from the 5′-end. In some other embodiments, the sense strand comprises 2′-fluoro nucleotides at positions 7, 9, 10, and 11 from the 5′-end. In some embodiments, the sense strand comprises 2′-fluoro nucleotides at positions opposite or complimentary to positions 11, 12, and 15 of the antisense strand, counting from the 5′-end of the antisense strand. In some other embodiments, the sense strand comprises 2′-fluoro nucleotides at positions opposite or complimentary to positions 11, 12, 13, and 15 of the antisense strand, counting from the 5′-end of the antisense strand. In some embodiments, the sense strand comprises a block of two, three or four 2′-fluoro nucleotides.

[0497] In some embodiments, the sense strand does not comprise a 2′-fluoro nucleotide in position opposite or complimentary to the thermally destabilizing modification of the duplex in the antisense strand.

[0498] In some embodiments, the dsRNA molecule of the disclosure comprises a 21 nucleotides (nt) sense strand and a 23 nucleotides (nt) antisense, wherein the antisense strand contains at least one thermally destabilizing nucleotide, where the at least one thermally destabilizing nucleotide occurs in the seed region of the antisense strand (i.e., at position 2-9 of the 5′-end of the antisense strand), wherein one end of the dsRNA is blunt, while the other end is comprises a 2 nt overhang, and wherein the dsRNA optionally further has at least one (e.g., one, two, three, four, five, six or all seven) of the following characteristics: (i) the antisense comprises 2, 3, 4, 5 or 6 2′-fluoro modifications; (ii) the antisense comprises 1, 2, 3, 4 or 5 phosphorothioate internucleotide linkages; (iii) the sense strand is conjugated with a ligand; (iv) the sense strand comprises 2, 3, 4 or 5 2′-fluoro modifications; (v) the sense strand comprises 1, 2, 3, 4 or 5 phosphorothioate internucleotide linkages; (vi) the dsRNA comprises at least four 2′-fluoro modifications; and (vii) the dsRNA comprises a blunt end at 5′-end of the antisense strand. Optionally, the 2 nt overhang is at the 3′-end of the antisense.

[0499] In some embodiments, the dsRNA molecule of the disclosure comprising a sense and antisense strands, wherein: the sense strand is 25-30 nucleotide residues in length, wherein starting from the 5′ terminal nucleotide (position 1), positions 1 to 23 of said sense strand comprise at least 8 ribonucleotides; antisense strand is 36-66 nucleotide residues in length and, starting from the 3′ terminal nucleotide, at least 8 ribonucleotides in the positions paired with positions 1-23 of sense strand to form a duplex; wherein at least the 3′ terminal nucleotide of antisense strand is unpaired with sense strand, and up to 6 consecutive 3′ terminal nucleotides are unpaired with sense strand, thereby forming a 3′ single stranded overhang of 1-6 nucleotides; wherein the 5′ terminus of antisense strand comprises from 10-30 consecutive nucleotides which are unpaired with sense strand, thereby forming a 10-30 nucleotide single stranded 5′ overhang; wherein at least the sense strand 5′ terminal and 3′ terminal nucleotides are base paired with nucleotides of antisense strand when sense and antisense strands are aligned for maximum complementarity, thereby forming a substantially duplexed region between sense and antisense strands; and antisense strand is sufficiently complementary to a target RNA along at least 19 ribonucleotides of antisense strand length to reduce target gene expression when said double stranded nucleic acid is introduced into a mammalian cell; and wherein the antisense strand contains at least one thermally destabilizing nucleotide, where at least one thermally destabilizing nucleotide is in the seed region of the antisense strand (i.e. at position 2-9 of the 5′-end of the antisense strand). For example, the thermally destabilizing nucleotide occurs between positions opposite or complimentary to positions 14-17 of the 5′-end of the sense strand, and wherein the dsRNA optionally further has at least one (e.g., one, two, three, four, five, six or all seven) of the following characteristics: (i) the antisense comprises 2, 3, 4, 5, or 6 2′-fluoro modifications; (ii) the antisense comprises 1, 2, 3, 4, or 5 phosphorothioate internucleotide linkages; (iii) the sense strand is conjugated with a ligand; (iv) the sense strand comprises 2, 3, 4, or 5 2′-fluoro modifications; (v) the sense strand comprises 1, 2, 3, 4, or 5 phosphorothioate internucleotide linkages; and (vi) the dsRNA comprises at least four 2′-fluoro modifications; and (vii) the dsRNA comprises a duplex region of 12-30 nucleotide pairs in length.

[0500] In some embodiments, the dsRNA molecule of the disclosure comprises a sense and antisense strands, wherein said dsRNA molecule comprises a sense strand having a length which is at least 25 and at most 29 nucleotides and an antisense strand having a length which is at most 30 nucleotides with the sense strand comprises a modified nucleotide that is susceptible to enzymatic degradation at position 11 from the 5′end, wherein the 3′ end of said sense strand and the 5′ end of said antisense strand form a blunt end and said antisense strand is 1-4 nucleotides longer at its 3′ end than the sense strand, wherein the duplex region which is at least 25 nucleotides in length, and said antisense strand is sufficiently complementary to a target mRNA along at least 19 nt of said antisense strand length to reduce target gene expression when said dsRNA molecule is introduced into a mammalian cell, and wherein dicer cleavage of said dsRNA preferentially results in an siRNA comprising said 3′ end of said antisense strand, thereby reducing expression of the target gene in the mammal, wherein the antisense strand contains at least one thermally destabilizing nucleotide, where the at least one thermally destabilizing nucleotide is in the seed region of the antisense strand (i.e. at position 2-9 of the 5′-end of the antisense strand), and wherein the dsRNA optionally further has at least one (e.g., one, two, three, four, five, six or all seven) of the following characteristics: (i) the antisense comprises 2, 3, 4, 5, or 6 2′-fluoro modifications; (ii) the antisense comprises 1, 2, 3, 4, or 5 phosphorothioate internucleotide linkages; (iii) the sense strand is conjugated with a ligand; (iv) the sense strand comprises 2, 3, 4, or 5 2′-fluoro modifications; (v) the sense strand comprises 1, 2, 3, 4, or 5 phosphorothioate internucleotide linkages; and (vi) the dsRNA comprises at least four 2′-fluoro modifications; and (vii) the dsRNA has a duplex region of 12-29 nucleotide pairs in length.

[0501] In some embodiments, every nucleotide in the sense strand and antisense strand of the dsRNA molecule may be modified. Each nucleotide may be modified with the same or different modification which can include one or more alteration of one or both of the non-linking phosphate oxygens or of one or more of the linking phosphate oxygens; alteration of a constituent of the ribose sugar, e.g., of the 2′ hydroxyl on the ribose sugar; wholesale replacement of the phosphate moiety with “dephospho” linkers; modification or replacement of a naturally occurring base; and replacement or modification of the ribose-phosphate backbone.

[0502] As nucleic acids are polymers of subunits, many of the modifications occur at a position which is repeated within a nucleic acid, e.g., a modification of a base, or a phosphate moiety, or a non-linking O of a phosphate moiety. In some cases, the modification will occur at all of the subject positions in the nucleic acid but in many cases it will not. By way of example, a modification may only occur at a 3′ or 5′ terminal position, may only occur in a terminal region, e.g., at a position on a terminal nucleotide or in the last 2, 3, 4, 5, or 10 nucleotides of a strand. A modification may occur in a double strand region, a single strand region, or in both. A modification may occur only in the double strand region of an RNA or may only occur in a single strand region of an RNA. E.g., a phosphorothioate modification at a non-linking O position may only occur at one or both termini, may only occur in a terminal region, e.g., at a position on a terminal nucleotide or in the last 2, 3, 4, 5, or 10 nucleotides of a strand, or may occur in double strand and single strand regions, particularly at termini. The 5′ end or ends can be phosphorylated.

[0503] It may be possible, e.g., to enhance stability, to include particular bases in overhangs, or to include modified nucleotides or nucleotide surrogates, in single strand overhangs, e.g., in a 5′ or 3′ overhang, or in both. E.g., it can be desirable to include purine nucleotides in overhangs. In some embodiments all or some of the bases in a 3′ or 5′ overhang may be modified, e.g., with a modification described herein. Modifications can include, e.g., the use of modifications at the 2′ position of the ribose sugar with modifications that are known in the art, e.g., the use of deoxyribonucleotides, 2′-deoxy-2′-fluoro (2′-F) or 2′-O-methyl modified instead of the ribosugar of the nucleobase, and modifications in the phosphate group, e.g., phosphorothioate modifications. Overhangs need not be homologous with the target sequence.

[0504] In some embodiments, each residue of the sense strand and antisense strand is independently modified with LNA, HNA, CeNA, 2′-methoxyethyl, 2′-O-methyl, 2′-O-allyl, 2′-C-allyl, 2′-deoxy, or 2′-fluoro. The strands can contain more than one modification. In some embodiments, each residue of the sense strand and antisense strand is independently modified with 2′-O-methyl or 2′-fluoro. It is to be understood that these modifications are in addition to the at least one thermally destabilizing modification of the duplex present in the antisense strand.

[0505] At least two different modifications are typically present on the sense strand and antisense strand. Those two modifications may be the 2′-deoxy, 2′-O-methyl or 2′-fluoro modifications, acyclic nucleotides or others. In some embodiments, the sense strand and antisense strand each comprises two differently modified nucleotides selected from 2′-O-methyl or 2′-deoxy. In some embodiments, each residue of the sense strand and antisense strand is independently modified with 2′-O-methyl nucleotide, 2′-deoxy nucleotide, 2′-deoxy-2′-fluoro nucleotide, 2′-O-N-methylacetamido (2′-O-NMA) nucleotide, a 2′-O-dimethylaminoethoxyethyl (2′-O-DMAEOE) nucleotide, 2′-O-aminopropyl (2′-O-AP) nucleotide, or 2′-ara-F nucleotide. Again, it is to be understood that these modifications are in addition to the at least one thermally destabilizing modification of the duplex present in the antisense strand.

[0506] In some embodiments, the dsRNA molecule of the disclosure comprises modifications of an alternating pattern, particular in the B1, B2, B3, B1′, B2′, B3′, B4′ regions. The term “alternating motif” or “alternative pattern” as used herein refers to a motif having one or more modifications, each modification occurring on alternating nucleotides of one strand. The alternating nucleotide may refer to one per every other nucleotide or one per every three nucleotides, or a similar pattern. For example, if A, B and C each represent one type of modification to the nucleotide, the alternating motif can be “ABABABABABAB . . . ,” “AABBAABBAABB . . . ,” “AABAABAABAAB . . . ,” “AAABAAABAAAB . . . ,” “AAABBBAAABBB . . . ,” or “ABCABCABCABC . . . ,” etc.

The type of modifications contained in the alternating motif may be the same or different. For example, if A, B, C, D each represent one type of modification on the nucleotide, the alternating pattern, i.e., modifications on every other nucleotide, may be the same, but each of the sense strand or antisense strand can be selected from several possibilities of modifications within the alternating motif such as “ABABAB . . . ”, “ACACAC . . . ” “BDBDBD . . . ” or “CDCDCD . . . ,” etc.

[0507] In some embodiments, the dsRNA molecule of the disclosure comprises the modification pattern for the alternating motif on the sense strand relative to the modification pattern for the alternating motif on the antisense strand is shifted. The shift may be such that the modified group of nucleotides of the sense strand corresponds to a differently modified group of nucleotides of the antisense strand and vice versa. For example, the sense strand when paired with the antisense strand in the dsRNA duplex, the alternating motif in the sense strand may start with “ABABAB” from 5′-3′ of the strand and the alternating motif in the antisense strand may start with “BABABA” from 3′-5′ of the strand within the duplex region. As another example, the alternating motif in the sense strand may start with “AABBAABB” from 5′-3′ of the strand and the alternating motif in the antisense strand may start with “BBAABBAA” from 3′-5′ of the strand within the duplex region, so that there is a complete or partial shift of the modification patterns between the sense strand and the antisense strand.

[0508] The dsRNA molecule of the disclosure may further comprise at least one phosphorothioate or methylphosphonate internucleotide linkage. The phosphorothioate or methylphosphonate internucleotide linkage modification may occur on any nucleotide of the sense strand or antisense strand or both in any position of the strand. For instance, the internucleotide linkage modification may occur on every nucleotide on the sense strand or antisense strand; each internucleotide linkage modification may occur in an alternating pattern on the sense strand or antisense strand; or the sense strand or antisense strand comprises both internucleotide linkage modifications in an alternating pattern. The alternating pattern of the internucleotide linkage modification on the sense strand may be the same or different from the antisense strand, and the alternating pattern of the internucleotide linkage modification on the sense strand may have a shift relative to the alternating pattern of the internucleotide linkage modification on the antisense strand.

[0509] In some embodiments, the dsRNA molecule comprises the phosphorothioate or methylphosphonate internucleotide linkage modification in the overhang region. For example, the overhang region comprises two nucleotides having a phosphorothioate or methylphosphonate internucleotide linkage between the two nucleotides. Internucleotide linkage modifications also may be made to link the overhang nucleotides with the terminal paired nucleotides within duplex region. For example, at least 2, 3, 4, or all the overhang nucleotides may be linked through phosphorothioate or methylphosphonate internucleotide linkage, and optionally, there may be additional phosphorothioate or methylphosphonate internucleotide linkages linking the overhang nucleotide with a paired nucleotide that is next to the overhang nucleotide. For instance, there may be at least two phosphorothioate internucleotide linkages between the terminal three nucleotides, in which two of the three nucleotides are overhang nucleotides, and the third is a paired nucleotide next to the overhang nucleotide. Optionally, these terminal three nucleotides may be at the 3′-end of the antisense strand.

[0510] In some embodiments, the sense strand of the dsRNA molecule comprises 1-10 blocks of two to ten phosphorothioate or methylphosphonate internucleotide linkages separated by 1, 2, 3, 4, 5, 6, 7, 8, 9, 10, 11, 12, 13, 14, 15, or 16 phosphate internucleotide linkages, wherein one of the phosphorothioate or methylphosphonate internucleotide linkages is placed at any position in the oligonucleotide sequence and the said sense strand is paired with an antisense strand comprising any combination of phosphorothioate, methylphosphonate and phosphate internucleotide linkages or an antisense strand comprising either phosphorothioate or methylphosphonate or phosphate linkage.

[0511] In some embodiments, the antisense strand of the dsRNA molecule comprises two blocks of two phosphorothioate or methylphosphonate internucleotide linkages separated by 1, 2, 3, 4, 5, 6, 7, 8, 9, 10, 11, 12, 13, 14, 15, 16, 17, or 18 phosphate internucleotide linkages, wherein one of the phosphorothioate or methylphosphonate internucleotide linkages is placed at any position in the oligonucleotide sequence and the said antisense strand is paired with a sense strand comprising any combination of phosphorothioate, methylphosphonate and phosphate internucleotide linkages or an antisense strand comprising either phosphorothioate or methylphosphonate or phosphate linkage.

[0512] In some embodiments, the antisense strand of the dsRNA molecule comprises two blocks of three phosphorothioate or methylphosphonate internucleotide linkages separated by 1, 2, 3, 4, 5, 6, 7, 8, 9, 10, 11, 12, 13, 14, 15, or 16 phosphate internucleotide linkages, wherein one of the phosphorothioate or methylphosphonate internucleotide linkages is placed at any position in the oligonucleotide sequence and the said antisense strand is paired with a sense strand comprising any combination of phosphorothioate, methylphosphonate and phosphate internucleotide linkages or an antisense strand comprising either phosphorothioate or methylphosphonate or phosphate linkage.

[0513] In some embodiments, the antisense strand of the dsRNA molecule comprises two blocks of four phosphorothioate or methylphosphonate internucleotide linkages separated by 1, 2, 3, 4, 5, 6, 7, 8, 9, 10, 11, 12, 13, or 14 phosphate internucleotide linkages, wherein one of the phosphorothioate or methylphosphonate internucleotide linkages is placed at any position in the oligonucleotide sequence and the said antisense strand is paired with a sense strand comprising any combination of phosphorothioate, methylphosphonate and phosphate internucleotide linkages or an antisense strand comprising either phosphorothioate or methylphosphonate or phosphate linkage.

[0514] In some embodiments, the antisense strand of the dsRNA molecule comprises two blocks of five phosphorothioate or methylphosphonate internucleotide linkages separated by 1, 2, 3, 4, 5, 6, 7, 8, 9, 10, 11, or 12 phosphate internucleotide linkages, wherein one of the phosphorothioate or methylphosphonate internucleotide linkages is placed at any position in the oligonucleotide sequence and the said antisense strand is paired with a sense strand comprising any combination of phosphorothioate, methylphosphonate and phosphate internucleotide linkages or an antisense strand comprising either phosphorothioate or methylphosphonate or phosphate linkage.

[0515] In some embodiments, the antisense strand of the dsRNA molecule comprises two blocks of six phosphorothioate or methylphosphonate internucleotide linkages separated by 1, 2, 3, 4, 5, 6, 7, 8, 9, or 10 phosphate internucleotide linkages, wherein one of the phosphorothioate or methylphosphonate internucleotide linkages is placed at any position in the oligonucleotide sequence and the said antisense strand is paired with a sense strand comprising any combination of phosphorothioate, methylphosphonate and phosphate internucleotide linkages or an antisense strand comprising either phosphorothioate or methylphosphonate or phosphate linkage.

[0516] In some embodiments, the antisense strand of the dsRNA molecule comprises two blocks of seven phosphorothioate or methylphosphonate internucleotide linkages separated by 1, 2, 3, 4, 5, 6, 7, or 8 phosphate internucleotide linkages, wherein one of the phosphorothioate or methylphosphonate internucleotide linkages is placed at any position in the oligonucleotide sequence and the said antisense strand is paired with a sense strand comprising any combination of phosphorothioate, methylphosphonate and phosphate internucleotide linkages or an antisense strand comprising either phosphorothioate or methylphosphonate or phosphate linkage.

[0517] In some embodiments, the antisense strand of the dsRNA molecule comprises two blocks of eight phosphorothioate or methylphosphonate internucleotide linkages separated by 1, 2, 3, 4, 5, or 6 phosphate internucleotide linkages, wherein one of the phosphorothioate or methylphosphonate internucleotide linkages is placed at any position in the oligonucleotide sequence and the said antisense strand is paired with a sense strand comprising any combination of phosphorothioate, methylphosphonate and phosphate internucleotide linkages or an antisense strand comprising either phosphorothioate or methylphosphonate or phosphate linkage.

[0518] In some embodiments, the antisense strand of the dsRNA molecule comprises two blocks of nine phosphorothioate or methylphosphonate internucleotide linkages separated by 1, 2, 3, or 4 phosphate internucleotide linkages, wherein one of the phosphorothioate or methylphosphonate internucleotide linkages is placed at any position in the oligonucleotide sequence and the said antisense strand is paired with a sense strand comprising any combination of phosphorothioate, methylphosphonate and phosphate internucleotide linkages or an antisense strand comprising either phosphorothioate or methylphosphonate or phosphate linkage.

[0519] In some embodiments, the dsRNA molecule of the disclosure further comprises one or more phosphorothioate or methylphosphonate internucleotide linkage modification within 1-10 of the termini position(s) of the sense or antisense strand. For example, at least 2, 3, 4, 5, 6, 7, 8, 9, or 10 nucleotides may be linked through phosphorothioate or methylphosphonate internucleotide linkage at one end or both ends of the sense or antisense strand.

[0520] In some embodiments, the dsRNA molecule of the disclosure further comprises one or more phosphorothioate or methylphosphonate internucleotide linkage modification within 1-10 of the internal region of the duplex of each of the sense or antisense strand. For example, at least 2, 3, 4, 5, 6, 7, 8, 9, or 10 nucleotides may be linked through phosphorothioate methylphosphonate internucleotide linkage at position 8-16 of the duplex region counting from the 5′-end of the sense strand; the dsRNA molecule can optionally further comprise one or more phosphorothioate or methylphosphonate internucleotide linkage modification within 1-10 of the termini position(s).

[0521] In some embodiments, the dsRNA molecule of the disclosure further comprises one to five phosphorothioate or methylphosphonate internucleotide linkage modification(s) within position 1-5 and one to five phosphorothioate or methylphosphonate internucleotide linkage modification(s) within position 18-23 of the sense strand (counting from the 5′-end), and one to five phosphorothioate or methylphosphonate internucleotide linkage modification at positions 1 and 2 and one to five within positions 18-23 of the antisense strand (counting from the 5′-end).

[0522] In some embodiments, the dsRNA molecule of the disclosure further comprises one phosphorothioate internucleotide linkage modification within position 1-5 and one phosphorothioate or methylphosphonate internucleotide linkage modification within position 18-23 of the sense strand (counting from the 5′-end), and one phosphorothioate internucleotide linkage modification at positions 1 and 2 and two phosphorothioate or methylphosphonate internucleotide linkage modifications within positions 18-23 of the antisense strand (counting from the 5′-end).

[0523] In some embodiments, the dsRNA molecule of the disclosure further comprises two phosphorothioate internucleotide linkage modifications within position 1-5 and one phosphorothioate internucleotide linkage modification within position 18-23 of the sense strand (counting from the 5′-end), and one phosphorothioate internucleotide linkage modification at positions 1 and 2 and two phosphorothioate internucleotide linkage modifications within positions 18-23 of the antisense strand (counting from the 5′-end).

[0524] In some embodiments, the dsRNA molecule of the disclosure further comprises two phosphorothioate internucleotide linkage modifications within position 1-5 and two phosphorothioate internucleotide linkage modifications within position 18-23 of the sense strand (counting from the 5′-end), and one phosphorothioate internucleotide linkage modification at positions 1 and 2 and two phosphorothioate internucleotide linkage modifications within positions 18-23 of the antisense strand (counting from the 5′-end).

[0525] In some embodiments, the dsRNA molecule of the disclosure further comprises two phosphorothioate internucleotide linkage modifications within position 1-5 and two phosphorothioate internucleotide linkage modifications within position 18-23 of the sense strand (counting from the 5′-end), and one phosphorothioate internucleotide linkage modification at positions 1 and 2 and one phosphorothioate internucleotide linkage modification within positions 18-23 of the antisense strand (counting from the 5′-end).

[0526] In some embodiments, the dsRNA molecule of the disclosure further comprises one phosphorothioate internucleotide linkage modification within position 1-5 and one phosphorothioate internucleotide linkage modification within position 18-23 of the sense strand (counting from the 5′-end), and two phosphorothioate internucleotide linkage modifications at positions 1 and 2 and two phosphorothioate internucleotide linkage modifications within positions 18-23 of the antisense strand (counting from the 5′-end).

[0527] In some embodiments, the dsRNA molecule of the disclosure further comprises one phosphorothioate internucleotide linkage modification within position 1-5 and one within position 18-23 of the sense strand (counting from the 5′-end), and two phosphorothioate internucleotide linkage modification at positions 1 and 2 and one phosphorothioate internucleotide linkage modification within positions 18-23 of the antisense strand (counting from the 5′-end).

[0528] In some embodiments, the dsRNA molecule of the disclosure further comprises one phosphorothioate internucleotide linkage modification within position 1-5 (counting from the 5′-end) of the sense strand, and two phosphorothioate internucleotide linkage modifications at positions 1 and 2 and one phosphorothioate internucleotide linkage modification within positions 18-23 of the antisense strand (counting from the 5′-end).

[0529] In some embodiments, the dsRNA molecule of the disclosure further comprises two phosphorothioate internucleotide linkage modifications within position 1-5 (counting from the 5′-end) of the sense strand, and one phosphorothioate internucleotide linkage modification at positions 1 and 2 and two phosphorothioate internucleotide linkage modifications within positions 18-23 of the antisense strand (counting from the 5′-end).

[0530] In some embodiments, the dsRNA molecule of the disclosure further comprises two phosphorothioate internucleotide linkage modifications within position 1-5 and one within position 18-23 of the sense strand (counting from the 5′-end), and two phosphorothioate internucleotide linkage modifications at positions 1 and 2 and one phosphorothioate internucleotide linkage modification within positions 18-23 of the antisense strand (counting from the 5′-end).

[0531] In some embodiments, the dsRNA molecule of the disclosure further comprises two phosphorothioate internucleotide linkage modifications within position 1-5 and one phosphorothioate internucleotide linkage modification within position 18-23 of the sense strand (counting from the 5′-end), and two phosphorothioate internucleotide linkage modifications at positions 1 and 2 and two phosphorothioate internucleotide linkage modifications within positions 18-23 of the antisense strand (counting from the 5′-end).

[0532] In some embodiments, the dsRNA molecule of the disclosure further comprises two phosphorothioate internucleotide linkage modifications within position 1-5 and one phosphorothioate internucleotide linkage modification within position 18-23 of the sense strand (counting from the 5′-end), and one phosphorothioate internucleotide linkage modification at positions 1 and 2 and two phosphorothioate internucleotide linkage modifications within positions 18-23 of the antisense strand (counting from the 5′-end).

[0533] In some embodiments, the dsRNA molecule of the disclosure further comprises two phosphorothioate internucleotide linkage modifications at position 1 and 2, and two phosphorothioate internucleotide linkage modifications at position 20 and 21 of the sense strand (counting from the 5′-end), and one phosphorothioate internucleotide linkage modification at positions 1 and one at position 21 of the antisense strand (counting from the 5′-end).

[0534] In some embodiments, the dsRNA molecule of the disclosure further comprises one phosphorothioate internucleotide linkage modification at position 1, and one phosphorothioate internucleotide linkage modification at position 21 of the sense strand (counting from the 5′-end), and two phosphorothioate internucleotide linkage modifications at positions 1 and 2 and two phosphorothioate internucleotide linkage modifications at positions 20 and 21 the antisense strand (counting from the 5′-end).

[0535] In some embodiments, the dsRNA molecule of the disclosure further comprises two phosphorothioate internucleotide linkage modifications at position 1 and 2, and two phosphorothioate internucleotide linkage modifications at position 21 and 22 of the sense strand (counting from the 5′-end), and one phosphorothioate internucleotide linkage modification at positions 1 and one phosphorothioate internucleotide linkage modification at position 21 of the antisense strand (counting from the 5′-end).

[0536] In some embodiments, the dsRNA molecule of the disclosure further comprises one phosphorothioate internucleotide linkage modification at position 1, and one phosphorothioate internucleotide linkage modification at position 21 of the sense strand (counting from the 5′-end), and two phosphorothioate internucleotide linkage modifications at positions 1 and 2 and two phosphorothioate internucleotide linkage modifications at positions 21 and 22 the antisense strand (counting from the 5′-end).

[0537] In some embodiments, the dsRNA molecule of the disclosure further comprises two phosphorothioate internucleotide linkage modifications at position 1 and 2, and two phosphorothioate internucleotide linkage modifications at position 22 and 23 of the sense strand (counting from the 5′-end), and one phosphorothioate internucleotide linkage modification at positions 1 and one phosphorothioate internucleotide linkage modification at position 21 of the antisense strand (counting from the 5′-end).

[0538] In some embodiments, the dsRNA molecule of the disclosure further comprises one phosphorothioate internucleotide linkage modification at position 1, and one phosphorothioate internucleotide linkage modification at position 21 of the sense strand (counting from the 5′-end), and two phosphorothioate internucleotide linkage modifications at positions 1 and 2 and two phosphorothioate internucleotide linkage modifications at positions 23 and 23 the antisense strand (counting from the 5′-end).

[0539] In some embodiments, compound of the disclosure comprises a pattern of backbone chiral centers. In some embodiments, a common pattern of backbone chiral centers comprises at least 5 internucleotidic linkages in the Sp configuration. In some embodiments, a common pattern of backbone chiral centers comprises at least 6 internucleotidic linkages in the Sp configuration. In some embodiments, a common pattern of backbone chiral centers comprises at least 7 internucleotidic linkages in the Sp configuration. In some embodiments, a common pattern of backbone chiral centers comprises at least 8 internucleotidic linkages in the Sp configuration. In some embodiments, a common pattern of backbone chiral centers comprises at least 9 internucleotidic linkages in the Sp configuration. In some embodiments, a common pattern of backbone chiral centers comprises at least 10 internucleotidic linkages in the Sp configuration. In some embodiments, a common pattern of backbone chiral centers comprises at least 11 internucleotidic linkages in the Sp configuration. In some embodiments, a common pattern of backbone chiral centers comprises at least 12 internucleotidic linkages in the Sp configuration. In some embodiments, a common pattern of backbone chiral centers comprises at least 13 internucleotidic linkages in the Sp configuration. In some embodiments, a common pattern of backbone chiral centers comprises at least 14 internucleotidic linkages in the Sp configuration. In some embodiments, a common pattern of backbone chiral centers comprises at least 15 internucleotidic linkages in the Sp configuration. In some embodiments, a common pattern of backbone chiral centers comprises at least 16 internucleotidic linkages in the Sp configuration. In some embodiments, a common pattern of backbone chiral centers comprises at least 17 internucleotidic linkages in the Sp configuration. In some embodiments, a common pattern of backbone chiral centers comprises at least 18 internucleotidic linkages in the Sp configuration. In some embodiments, a common pattern of backbone chiral centers comprises at least 19 internucleotidic linkages in the Sp configuration. In some embodiments, a common pattern of backbone chiral centers comprises no more than 8 internucleotidic linkages in the Rp configuration. In some embodiments, a common pattern of backbone chiral centers comprises no more than 7 internucleotidic linkages in the Rp configuration. In some embodiments, a common pattern of backbone chiral centers comprises no more than 6 internucleotidic linkages in the Rp configuration. In some embodiments, a common pattern of backbone chiral centers comprises no more than 5 internucleotidic linkages in the Rp configuration. In some embodiments, a common pattern of backbone chiral centers comprises no more than 4 internucleotidic linkages in the Rp configuration. In some embodiments, a common pattern of backbone chiral centers comprises no more than 3 internucleotidic linkages in the Rp configuration. In some embodiments, a common pattern of backbone chiral centers comprises no more than 2 internucleotidic linkages in the Rp configuration. In some embodiments, a common pattern of backbone chiral centers comprises no more than 1 internucleotidic linkages in the Rp configuration. In some embodiments, a common pattern of backbone chiral centers comprises no more than 8 internucleotidic linkages which are not chiral (as a non-limiting example, a phosphodiester). In some embodiments, a common pattern of backbone chiral centers comprises no more than 7 internucleotidic linkages which are not chiral. In some embodiments, a common pattern of backbone chiral centers comprises no more than 6 internucleotidic linkages which are not chiral. In some embodiments, a common pattern of backbone chiral centers comprises no more than 5 internucleotidic linkages which are not chiral. In some embodiments, a common pattern of backbone chiral centers comprises no more than 4 internucleotidic linkages which are not chiral. In some embodiments, a common pattern of backbone chiral centers comprises no more than 3 internucleotidic linkages which are not chiral. In some embodiments, a common pattern of backbone chiral centers comprises no more than 2 internucleotidic linkages which are not chiral. In some embodiments, a common pattern of backbone chiral centers comprises no more than 1 internucleotidic linkages which are not chiral. In some embodiments, a common pattern of backbone chiral centers comprises at least 10 internucleotidic linkages in the Sp configuration, and no more than 8 internucleotidic linkages which are not chiral. In some embodiments, a common pattern of backbone chiral centers comprises at least 11 internucleotidic linkages in the Sp configuration, and no more than 7 internucleotidic linkages which are not chiral. In some embodiments, a common pattern of backbone chiral centers comprises at least 12 internucleotidic linkages in the Sp configuration, and no more than 6 internucleotidic linkages which are not chiral. In some embodiments, a common pattern of backbone chiral centers comprises at least 13 internucleotidic linkages in the Sp configuration, and no more than 6 internucleotidic linkages which are not chiral. In some embodiments, a common pattern of backbone chiral centers comprises at least 14 internucleotidic linkages in the Sp configuration, and no more than 5 internucleotidic linkages which are not chiral. In some embodiments, a common pattern of backbone chiral centers comprises at least 15 internucleotidic linkages in the Sp configuration, and no more than 4 internucleotidic linkages which are not chiral. In some embodiments, the internucleotidic linkages in the Sp configuration are optionally contiguous or not contiguous. In some embodiments, the internucleotidic linkages in the Rp configuration are optionally contiguous or not contiguous. In some embodiments, the internucleotidic linkages which are not chiral are optionally contiguous or not contiguous.

[0540] In some embodiments, compound of the disclosure comprises a block is a stereochemistry block. In some embodiments, a block is an Rp block in that each internucleotidic linkage of the block is Rp. In some embodiments, a 5′-block is an Rp block. In some embodiments, a 3′-block is an Rp block. In some embodiments, a block is an Sp block in that each internucleotidic linkage of the block is Sp. In some embodiments, a 5′-block is an Sp block. In some embodiments, a 3′-block is an Sp block. In some embodiments, provided oligonucleotides comprise both Rp and Sp blocks. In some embodiments, provided oligonucleotides comprise one or more Rp but no Sp blocks. In some embodiments, provided oligonucleotides comprise one or more Sp but no Rp blocks. In some embodiments, provided oligonucleotides comprise one or more PO blocks wherein each internucleotidic linkage in a natural phosphate linkage.

[0541] In some embodiments, compound of the disclosure comprises a 5′-block is an Sp block wherein each sugar moiety comprises a 2′-F modification. In some embodiments, a 5′-block is an Sp block wherein each of internucleotidic linkage is a modified internucleotidic linkage and each sugar moiety comprises a 2′-F modification. In some embodiments, a 5′-block is an Sp block wherein each of internucleotidic linkage is a phosphorothioate linkage and each sugar moiety comprises a 2′-F modification. In some embodiments, a 5′-block comprises 4 or more nucleoside units. In some embodiments, a 5′-block comprises 5 or more nucleoside units. In some embodiments, a 5′-block comprises 6 or more nucleoside units. In some embodiments, a 5′-block comprises 7 or more nucleoside units. In some embodiments, a 3′-block is an Sp block wherein each sugar moiety comprises a 2′-F modification. In some embodiments, a 3′-block is an Sp block wherein each of internucleotidic linkage is a modified internucleotidic linkage and each sugar moiety comprises a 2′-F modification. In some embodiments, a 3′-block is an Sp block wherein each of internucleotidic linkage is a phosphorothioate linkage and each sugar moiety comprises a 2′-F modification. In some embodiments, a 3′-block comprises 4 or more nucleoside units. In some embodiments, a 3′-block comprises 5 or more nucleoside units. In some embodiments, a 3′-block comprises 6 or more nucleoside units. In some embodiments, a 3′-block comprises 7 or more nucleoside units.

[0542] In some embodiments, compound of the disclosure comprises a type of nucleoside in a region or an oligonucleotide is followed by a specific type of internucleotidic linkage, e.g., natural phosphate linkage, modified internucleotidic linkage, Rp chiral internucleotidic linkage, Sp chiral internucleotidic linkage, etc. In some embodiments, A is followed by Sp. In some embodiments, A is followed by Rp. In some embodiments, A is followed by natural phosphate linkage (PO). In some embodiments, U is followed by Sp. In some embodiments, U is followed by Rp. In some embodiments, U is followed by natural phosphate linkage (PO). In some embodiments, C is followed by Sp. In some embodiments, C is followed by Rp. In some embodiments, C is followed by natural phosphate linkage (PO). In some embodiments, G is followed by Sp. In some embodiments, G is followed by Rp. In some embodiments, G is followed by natural phosphate linkage (PO). In some embodiments, C and U are followed by Sp. In some embodiments, C and U are followed by Rp. In some embodiments, C and U are followed by natural phosphate linkage (PO). In some embodiments, A and G are followed by Sp. In some embodiments, A and G are followed by Rp.

[0543] In some embodiments, the antisense strand comprises phosphorothioate internucleotide linkages between nucleotide positions 21 and 22, and between nucleotide positions 22 and 23, wherein the antisense strand contains at least one thermally destabilizing modification of the duplex located in the seed region of the antisense strand (i.e., at position 2-9 of the 5′-end of the antisense strand), and wherein the dsRNA optionally further has at least one (e.g., one, two, three, four, five, six, seven or all eight) of the following characteristics: (i) the antisense comprises 2, 3, 4, 5 or 6 2′-fluoro modifications; (ii) the antisense comprises 3, 4 or 5 phosphorothioate internucleotide linkages; (iii) the sense strand is conjugated with a ligand; (iv) the sense strand comprises 2, 3, 4 or 5 2′-fluoro modifications; (v) the sense strand comprises 1, 2, 3, 4 or 5 phosphorothioate internucleotide linkages; (vi) the dsRNA comprises at least four 2′-fluoro modifications; (vii) the dsRNA comprises a duplex region of 12-40 nucleotide pairs in length; and (viii) the dsRNA has a blunt end at 5′-end of the antisense strand.

[0544] In some embodiments, the antisense strand comprises phosphorothioate internucleotide linkages between nucleotide positions 1 and 2, between nucleotide positions 2 and 3, between nucleotide positions 21 and 22, and between nucleotide positions 22 and 23, wherein the antisense strand contains at least one thermally destabilizing modification of the duplex located in the seed region of the antisense strand (i.e., at position 2-9 of the 5′-end of the antisense strand), and wherein the dsRNA optionally further has at least one (e.g., one, two, three, four, five, six, seven or all eight) of the following characteristics: (i) the antisense comprises 2, 3, 4, 5 or 6 2′-fluoro modifications; (ii) the sense strand is conjugated with a ligand; (iii) the sense strand comprises 2, 3, 4 or 5 2′-fluoro modifications; (iv) the sense strand comprises 1, 2, 3, 4 or 5 phosphorothioate internucleotide linkages; (v) the dsRNA comprises at least four 2′-fluoro modifications; (vi) the dsRNA comprises a duplex region of 12-40 nucleotide pairs in length; (vii) the dsRNA comprises a duplex region of 12-40 nucleotide pairs in length; and (viii) the dsRNA has a blunt end at 5′-end of the antisense strand.

[0545] In some embodiments, the sense strand comprises phosphorothioate internucleotide linkages between nucleotide positions 1 and 2, and between nucleotide positions 2 and 3, wherein the antisense strand contains at least one thermally destabilizing modification of the duplex located in the seed region of the antisense strand (i.e., at position 2-9 of the 5′-end of the antisense strand), and wherein the dsRNA optionally further has at least one (e.g., one, two, three, four, five, six, seven or all eight) of the following characteristics: (i) the antisense comprises 2, 3, 4, 5 or 6 2′-fluoro modifications; (ii) the antisense comprises 1, 2, 3, 4 or 5 phosphorothioate internucleotide linkages; (iii) the sense strand is conjugated with a ligand; (iv) the sense strand comprises 2, 3, 4 or 5 2′-fluoro modifications; (v) the sense strand comprises 3, 4 or 5 phosphorothioate internucleotide linkages; (vi) the dsRNA comprises at least four 2′-fluoro modifications; (vii) the dsRNA comprises a duplex region of 12-40 nucleotide pairs in length; and (viii) the dsRNA has a blunt end at 5′-end of the antisense strand.

[0546] In some embodiments, the sense strand comprises phosphorothioate internucleotide linkages between nucleotide positions 1 and 2, and between nucleotide positions 2 and 3, the antisense strand comprises phosphorothioate internucleotide linkages between nucleotide positions 1 and 2, between nucleotide positions 2 and 3, between nucleotide positions 21 and 22, and between nucleotide positions 22 and 23, wherein the antisense strand contains at least one thermally destabilizing modification of the duplex located in the seed region of the antisense strand (i.e., at position 2-9 of the 5′-end of the antisense strand), and wherein the dsRNA optionally further has at least one (e.g., one, two, three, four, five, six or all seven) of the following characteristics: (i) the antisense comprises 2, 3, 4, 5 or 6 2′-fluoro modifications; (ii) the sense strand is conjugated with a ligand; (iii) the sense strand comprises 2, 3, 4 or 5 2′-fluoro modifications; (iv) the sense strand comprises 3, 4 or 5 phosphorothioate internucleotide linkages; (v) the dsRNA comprises at least four 2′-fluoro modifications; (vi) the dsRNA comprises a duplex region of 12-40 nucleotide pairs in length; and (vii) the dsRNA has a blunt end at 5′-end of the antisense strand.

[0547] In some embodiments, the dsRNA molecule of the disclosure comprises mismatch(es) with the target, within the duplex, or combinations thereof. The mismatch can occur in the overhang region or the duplex region. The base pair can be ranked on the basis of their propensity to promote dissociation or melting (e.g., on the free energy of association or dissociation of a particular pairing, the simplest approach is to examine the pairs on an individual pair basis, though next neighbor or similar analysis can also be used). In terms of promoting dissociation: A:U is preferred over G:C; G:U is preferred over G:C; and I:C is preferred over G:C (I=inosine). Mismatches, e.g., non-canonical or other than canonical pairings (as described elsewhere herein) are preferred over canonical (A:T, A:U, G:C) pairings; and pairings which include a universal base are preferred over canonical pairings.

[0548] In some embodiments, the dsRNA molecule of the disclosure comprises at least one of the first 1, 2, 3, 4, or 5 base pairs within the duplex regions from the 5′-end of the antisense strand can be chosen independently from the group of: A:U, G:U, I:C, and mismatched pairs, e.g., non-canonical or other than canonical pairings or pairings which include a universal base, to promote the dissociation of the antisense strand at the 5′-end of the duplex.

[0549] In some embodiments, the nucleotide at the 1 position within the duplex region from the 5′-end in the antisense strand is selected from the group consisting of A, dA, dU, U, and dT. Alternatively, at least one of the first 1, 2 or 3 base pair within the duplex region from the 5′-end of the antisense strand is an AU base pair. For example, the first base pair within the duplex region from the 5′-end of the antisense strand is an AU base pair.

[0550] It was found that introducing 4′-modified or 5′-modified nucleotide to the 3′-end of a phosphodiester (PO), phosphorothioate (PS), or phosphorodithioate (PS2) linkage of a dinucleotide at any position of single stranded or double stranded oligonucleotide can exert steric effect to the internucleotide linkage and, hence, protecting or stabilizing it against nucleases.

[0551] In some embodiments, 5′-modified nucleoside is introduced at the 3′-end of a dinucleotide at any position of single stranded or double stranded siRNA. For instance, a 5′-alkylated nucleoside may be introduced at the 3′-end of a dinucleotide at any position of single stranded or double stranded siRNA. The alkyl group at the 5′ position of the ribose sugar can be racemic or chirally pure R or S isomer. An exemplary 5′-alkylated nucleoside is 5′-methyl nucleoside. The 5′-methyl can be either racemic or chirally pure R or S isomer.

[0552] In some embodiments, 4′-modified nucleoside is introduced at the 3′-end of a dinucleotide at any position of single stranded or double stranded siRNA. For instance, a 4′-alkylated nucleoside may be introduced at the 3′-end of a dinucleotide at any position of single stranded or double stranded siRNA. The alkyl group at the 4′ position of the ribose sugar can be racemic or chirally pure R or S isomer. An exemplary 4′-alkylated nucleoside is 4′-methyl nucleoside. The 4′-methyl can be either racemic or chirally pure R or S isomer. Alternatively, a 4′-O-alkylated nucleoside may be introduced at the 3′-end of a dinucleotide at any position of single stranded or double stranded siRNA. The 4′-O-alkyl of the ribose sugar can be racemic or chirally pure R or S isomer. An exemplary 4′-O-alkylated nucleoside is 4′-O-methyl nucleoside. The 4′-O-methyl can be either racemic or chirally pure R or S isomer.

[0553] In some embodiments, 5′-alkylated nucleoside is introduced at any position on the sense strand or antisense strand of a dsRNA, and such modification maintains or improves potency of the dsRNA. The 5′-alkyl can be either racemic or chirally pure R or S isomer. An exemplary 5′-alkylated nucleoside is 5′-methyl nucleoside. The 5′-methyl can be either racemic or chirally pure R or S isomer.

[0554] In some embodiments, 4′-alkylated nucleoside is introduced at any position on the sense strand or antisense strand of a dsRNA, and such modification maintains or improves potency of the dsRNA. The 4′-alkyl can be either racemic or chirally pure R or S isomer. An exemplary 4′-alkylated nucleoside is 4′-methyl nucleoside. The 4′-methyl can be either racemic or chirally pure R or S isomer.

[0555] In some embodiments, 4′-O-alkylated nucleoside is introduced at any position on the sense strand or antisense strand of a dsRNA, and such modification maintains or improves potency of the dsRNA. The 5′-alkyl can be either racemic or chirally pure R or S isomer. An exemplary 4′-O-alkylated nucleoside is 4′-O-methyl nucleoside. The 4′-O-methyl can be either racemic or chirally pure R or S isomer.

[0556] In some embodiments, the dsRNA molecule of the disclosure can comprise 2′-5′ linkages (with 2′-H, 2′-OH and 2′-OMe and with P═O or P═S). For example, the 2′-5′ linkages modifications can be used to promote nuclease resistance or to inhibit binding of the sense to the antisense strand, or can be used at the 5′ end of the sense strand to avoid sense strand activation by RISC.

[0557] In another embodiment, the dsRNA molecule of the disclosure can comprise L sugars (e.g., L ribose, L-arabinose with 2′-H, 2′-OH and 2′-OMe). For example, these L sugars modifications can be used to promote nuclease resistance or to inhibit binding of the sense to the antisense strand, or can be used at the 5′ end of the sense strand to avoid sense strand activation by RISC.

[0558] Various publications describe multimeric siRNA which can all be used with the dsRNA of the disclosure. Such publications include WO2007/091269, U.S. Pat. No. 7,858,769, WO2010/141511, WO2007/117686, WO2009/014887, and WO2011/031520 which are hereby incorporated by their entirely.

[0559] As described in more detail below, the RNAi agent that contains conjugations of one or more carbohydrate moieties to an RNAi agent can optimize one or more properties of the RNAi agent. In many cases, the carbohydrate moiety will be attached to a modified subunit of the RNAi agent. For example, the ribose sugar of one or more ribonucleotide subunits of a dsRNA agent can be replaced with another moiety, e.g., a non-carbohydrate (optionally cyclic) carrier to which is attached a carbohydrate ligand. A ribonucleotide subunit in which the ribose sugar of the subunit has been so replaced is referred to herein as a ribose replacement modification subunit (RRMS). A cyclic carrier may be a carbocyclic ring system, i.e., all ring atoms are carbon atoms, or a heterocyclic ring system, i.e., one or more ring atoms may be a heteroatom, e.g., nitrogen, oxygen, sulfur. The cyclic carrier may be a monocyclic ring system, or may contain two or more rings, e.g. fused rings. The cyclic carrier may be a fully saturated ring system, or it may contain one or more double bonds.

[0560] The ligand may be attached to the polynucleotide via a carrier. The carriers include (i) at least one “backbone attachment point,” optionally two “backbone attachment points” and (ii) at least one “tethering attachment point.” A “backbone attachment point” as used herein refers to a functional group, e.g. a hydroxyl group, or generally, a bond available for, and that is suitable for incorporation of the carrier into the backbone, e.g., the phosphate, or modified phosphate, e.g., sulfur containing, backbone, of a ribonucleic acid. A “tethering attachment point” (TAP) in some embodiments refers to a constituent ring atom of the cyclic carrier, e.g., a carbon atom or a heteroatom (distinct from an atom which provides a backbone attachment point), that connects a selected moiety. The moiety can be, e.g., a carbohydrate, e.g. monosaccharide, disaccharide, trisaccharide, tetrasaccharide, oligosaccharide and polysaccharide. Optionally, the selected moiety is connected by an intervening tether to the cyclic carrier. Thus, the cyclic carrier will often include a functional group, e.g., an amino group, or generally, provide a bond, that is suitable for incorporation or tethering of another chemical entity, e.g., a ligand to the constituent ring.

[0561] The RNAi agents may be conjugated to a ligand via a carrier, wherein the carrier can be a cyclic group or an acyclic group. Optionally, the cyclic group is selected from pyrrolidinyl, pyrazolinyl, pyrazolidinyl, imidazolinyl, imidazolidinyl, piperidinyl, piperazinyl, [1,3]dioxolane, oxazolidinyl, isoxazolidinyl, morpholinyl, thiazolidinyl, isothiazolidinyl, quinoxalinyl, pyridazinonyl, tetrahydrofuryl and decalin. Optionally, the acyclic group is selected from serinol backbone and diethanolamine backbone.

[0562] In certain specific embodiments, the RNAi agent for use in the methods of the disclosure is an agent selected from the group of agents listed in Tables 2, 3, 12 or 13. These agents may further comprise a ligand, such as one or more lipophilic moieties, one or more GalNAc derivatives, or both of one of more lipophilic moieties and one or more GalNAc derivatives.

[0563] III. iRNAs Conjugated to Ligands

[0564] Another modification of the RNA of an iRNA of the disclosure involves chemically linking to the iRNA one or more ligands, moieties or conjugates that enhance the activity, cellular distribution or cellular uptake of the iRNA, e.g., into a cell. Such moieties include but are not limited to lipid moieties such as a cholesterol moiety (Letsinger et al., Proc. Natl. Acid. Sci. USA, 1989, 86: 6553-6556), cholic acid (Manoharan et al., Biorg. Med. Chem. Let., 1994, 4: 1053-1060), a thioether, e.g., beryl-S-tritylthiol (Manoharan et al., Ann. N.Y. Acad. Sci., 1992, 660: 306-309; Manoharan et al., Biorg. Med. Chem. Let., 1993, 3: 2765-2770), a thiocholesterol (Oberhauser et al., Nucl. Acids Res., 1992, 20: 533-538), an aliphatic chain, e.g., dodecandiol or undecyl residues (Saison-Behmoaras et al., EMBO J, 1991, 10: 1111-1118; Kabanov et al., FEBS Lett., 1990, 259: 327-330; Svinarchuk et al., Biochimie, 1993, 75: 49-54), a phospholipid, e.g., di-hexadecyl-rac-glycerol or triethyl-ammonium 1,2-di-O-hexadecyl-rac-glycero-3-phosphonate (Manoharan et al., Tetrahedron Lett., 1995, 36: 3651-3654; Shea et al., Nucl. Acids Res., 1990, 18: 3777-3783), a polyamine or a polyethylene glycol chain (Manoharan et al., Nucleosides & Nucleotides, 1995, 14: 969-973), or adamantane acetic acid (Manoharan et al., Tetrahedron Lett., 1995, 36: 3651-3654), a palmityl moiety (Mishra et al., Biochim. Biophys. Acta, 1995, 1264: 229-237), or an octadecylamine or hexylamino-carbonyloxycholesterol moiety (Crooke et al., J. Pharmacol. Exp. Ther., 1996, 277: 923-937).

[0565] In certain embodiments, a ligand alters the distribution, targeting or lifetime of an iRNA agent into which it is incorporated. In some embodiments, a ligand provides an enhanced affinity for a selected target, e.g., molecule, cell or cell type, compartment, e.g., a cellular or organ compartment, tissue, organ or region of the body, as, e.g., compared to a species absent such a ligand. Typical ligands will not take part in duplex pairing in a duplexed nucleic acid.

[0566] Ligands can include a naturally occurring substance, such as a protein (e.g., human serum albumin (HSA), low-density lipoprotein (LDL), or globulin); carbohydrate (e.g., a dextran, pullulan, chitin, chitosan, inulin, cyclodextrin or hyaluronic acid); or a lipid. The ligand may also be a recombinant or synthetic molecule, such as a synthetic polymer, e.g., a synthetic polyamino acid. Examples of polyamino acids include polyamino acid is a polylysine (PLL), poly L-aspartic acid, poly L-glutamic acid, styrene-maleic acid anhydride copolymer, poly(L-lactide-co-glycolied) copolymer, divinyl ether-maleic anhydride copolymer, N-(2-hydroxypropyl)methacrylamide copolymer (HMPA), polyethylene glycol (PEG), polyvinyl alcohol (PVA), polyurethane, poly(2-ethylacryllic acid), N-isopropylacrylamide polymers, or polyphosphazine. Example of polyamines include: polyethylenimine, polylysine (PLL), spermine, spermidine, polyamine, pseudopeptide-polyamine, peptidomimetic polyamine, dendrimer polyamine, arginine, amidine, protamine, cationic lipid, cationic porphyrin, quaternary salt of a polyamine, or an α-helical peptide.

[0567] Ligands can also include targeting groups, e.g., a cell or tissue targeting agent, e.g., a lectin, glycoprotein, lipid or protein, e.g., an antibody, that binds to a specified cell type such as a kidney cell. A targeting group can be a thyrotropin, melanotropin, lectin, glycoprotein, surfactant protein A, mucin carbohydrate, multivalent lactose, multivalent galactose, N-acetyl-galactosamine, N-acetyl-glucosamine multivalent mannose, multivalent fucose, glycosylated polyaminoacids, multivalent galactose, transferrin, bisphosphonate, polyglutamate, polyaspartate, a lipid, cholesterol, a steroid, bile acid, folate, vitamin B12, biotin, or an RGD peptide or RGD peptide mimetic. In certain embodiments, the ligand is a multivalent galactose, e.g., an N-acetyl-galactosamine.

[0568] Other examples of ligands include dyes, intercalating agents (e.g. acridines), cross-linkers (e.g. psoralene, mitomycin C), porphyrins (TPPC4, texaphyrin, Sapphyrin), polycyclic aromatic hydrocarbons (e.g., phenazine, dihydrophenazine), artificial endonucleases (e.g. EDTA), lipophilic molecules, e.g., cholesterol, cholic acid, adamantane acetic acid, 1-pyrene butyric acid, dihydrotestosterone, 1,3-Bis-O(hexadecyl)glycerol, geranyloxyhexyl group, hexadecylglycerol, borneol, menthol, 1,3-propanediol, heptadecyl group, palmitic acid, myristic acid, O3-(oleoyl)lithocholic acid, O3-(oleoyl)cholenic acid, dimethoxytrityl, or phenoxazine) and peptide conjugates (e.g., antennapedia peptide, Tat peptide), alkylating agents, phosphate, amino, mercapto, PEG (e.g., PEG-40K), MPEG, [MPEG]₂, polyamino, alkyl, substituted alkyl, radiolabeled markers, enzymes, haptens (e.g. biotin), transport/absorption facilitators (e.g., aspirin, vitamin E, folic acid), synthetic ribonucleases (e.g., imidazole, bisimidazole, histamine, imidazole clusters, acridine-imidazole conjugates, Eu3+ complexes of tetraazamacrocycles), dinitrophenyl, HRP, or AP.

[0569] Ligands can be proteins, e.g., glycoproteins, or peptides, e.g., molecules having a specific affinity for a co-ligand, or antibodies e.g., an antibody, that binds to a specified cell type such as a cancer cell, endothelial cell, or bone cell. Ligands may also include hormones and hormone receptors. They can also include non-peptidic species, such as lipids, lectins, carbohydrates, vitamins, cofactors, multivalent lactose, multivalent galactose, N-acetyl-galactosamine, N-acetyl-glucosamine multivalent mannose, or multivalent fucose. The ligand can be, for example, a lipopolysaccharide, an activator of p38 MAP kinase, or an activator of NF-κB.

[0570] The ligand can be a substance, e.g., a drug, which can increase the uptake of the iRNA agent into the cell, for example, by disrupting the cell's cytoskeleton, e.g., by disrupting the cell's microtubules, microfilaments, or intermediate filaments. The drug can be, for example, taxon, vincristine, vinblastine, cytochalasin, nocodazole, japlakinolide, latrunculin A, phalloidin, swinholide A, indanocine, or myoservin.

[0571] In some embodiments, a ligand attached to an iRNA as described herein acts as a pharmacokinetic modulator (PK modulator). PK modulators include lipophiles, bile acids, steroids, phospholipid analogues, peptides, protein binding agents, PEG, vitamins etc. Exemplary PK modulators include, but are not limited to, cholesterol, fatty acids, cholic acid, lithocholic acid, dialkylglycerides, diacylglyceride, phospholipids, sphingolipids, naproxen, ibuprofen, vitamin E, biotin etc. Oligonucleotides that comprise a number of phosphorothioate linkages are also known to bind to serum protein, thus short oligonucleotides, e.g., oligonucleotides of about 5 bases, 10 bases, 15 bases or 20 bases, comprising multiple of phosphorothioate linkages in the backbone are also amenable to the present disclosure as ligands (e.g. as PK modulating ligands). In addition, aptamers that bind serum components (e.g. serum proteins) are also suitable for use as PK modulating ligands in the embodiments described herein.

[0572] Ligand-conjugated iRNAs of the disclosure may be synthesized by the use of an oligonucleotide that bears a pendant reactive functionality, such as that derived from the attachment of a linking molecule onto the oligonucleotide (described below). This reactive oligonucleotide may be reacted directly with commercially-available ligands, ligands that are synthesized bearing any of a variety of protecting groups, or ligands that have a linking moiety attached thereto.

[0573] The oligonucleotides used in the conjugates of the present disclosure may be conveniently and routinely made through the well-known technique of solid-phase synthesis. Equipment for such synthesis is sold by several vendors including, for example, Applied Biosystems® (Foster City, Calif.). Any other means for such synthesis known in the art may additionally or alternatively be employed. It is also known to use similar techniques to prepare other oligonucleotides, such as the phosphorothioates and alkylated derivatives.

[0574] In the ligand-conjugated oligonucleotides and ligand-molecule bearing sequence-specific linked nucleosides of the present disclosure, the oligonucleotides and oligonucleosides may be assembled on a suitable DNA synthesizer utilizing standard nucleotide or nucleoside precursors, or nucleotide or nucleoside conjugate precursors that already bear the linking moiety, ligand-nucleotide or nucleoside-conjugate precursors that already bear the ligand molecule, or non-nucleoside ligand-bearing building blocks.

[0575] When using nucleotide-conjugate precursors that already bear a linking moiety, the synthesis of the sequence-specific linked nucleosides is typically completed, and the ligand molecule is then reacted with the linking moiety to form the ligand-conjugated oligonucleotide. In some embodiments, the oligonucleotides or linked nucleosides of the present disclosure are synthesized by an automated synthesizer using phosphoramidites derived from ligand-nucleoside conjugates in addition to the standard phosphoramidites and non-standard phosphoramidites that are commercially available and routinely used in oligonucleotide synthesis.

[0576] A. Lipid Conjugates

[0577] In certain embodiments, the ligand or conjugate is a lipid or lipid-based molecule. Such a lipid or lipid-based molecule can typically bind a serum protein, such as human serum albumin (HSA). An HSA binding ligand allows for distribution of the conjugate to a target tissue, e.g., a non-kidney target tissue of the body. For example, the target tissue can be the liver, including parenchymal cells of the liver. Other molecules that can bind HSA can also be used as ligands. For example, naproxen or aspirin can be used. A lipid or lipid-based ligand can (a) increase resistance to degradation of the conjugate, (b) increase targeting or transport into a target cell or cell membrane, or (c) can be used to adjust binding to a serum protein, e.g., HSA.

[0578] A lipid-based ligand can be used to modulate, e.g., control (e.g., inhibit) the binding of the conjugate to a target tissue. For example, a lipid or lipid-based ligand that binds to HSA more strongly will be less likely to be targeted to the kidney and therefore less likely to be cleared from the body. A lipid or lipid-based ligand that binds to HSA less strongly can be used to target the conjugate to the kidney.

[0579] In certain embodiments, the lipid-based ligand binds HSA. For example, the ligand can bind HSA with a sufficient affinity such that distribution of the conjugate to a non-kidney tissue is enhanced. However, the affinity is typically not so strong that the HSA-ligand binding cannot be reversed.

[0580] In certain embodiments, the lipid-based ligand binds HSA weakly or not at all, such that distribution of the conjugate to the kidney is enhanced. Other moieties that target to kidney cells can also be used in place of or in addition to the lipid-based ligand.

[0581] In another aspect, the ligand is a moiety, e.g., a vitamin, which is taken up by a target cell, e.g., a proliferating cell. These are particularly useful for treating disorders characterized by unwanted cell proliferation, e.g., of the malignant or non-malignant type, e.g., cancer cells. Exemplary vitamins include vitamin A, E, and K. Other exemplary vitamins include are B vitamin, e.g., folic acid, B12, riboflavin, biotin, pyridoxal or other vitamins or nutrients taken up by cancer cells. Also included are HSA and low density lipoprotein (LDL).

[0582] B. Cell Permeation Agents

[0583] In another aspect, the ligand is a cell-permeation agent, such as a helical cell-permeation agent. In certain embodiments, the agent is amphipathic. An exemplary agent is a peptide such as tat or antennopedia. If the agent is a peptide, it can be modified, including a peptidylmimetic, invertomers, non-peptide or pseudo-peptide linkages, and use of D-amino acids. The helical agent is typically an α-helical agent and can have a lipophilic and a lipophobic phase.

[0584] The ligand can be a peptide or peptidomimetic. A peptidomimetic (also referred to herein as an oligopeptidomimetic) is a molecule capable of folding into a defined three-dimensional structure similar to a natural peptide. The attachment of peptide and peptidomimetics to iRNA agents can affect pharmacokinetic distribution of the iRNA, such as by enhancing cellular recognition and absorption. The peptide or peptidomimetic moiety can be about 5-50 amino acids long, e.g., about 5, 10, 15, 20, 25, 30, 35, 40, 45, or 50 amino acids long.

[0585] A peptide or peptidomimetic can be, for example, a cell permeation peptide, cationic peptide, amphipathic peptide, or hydrophobic peptide (e.g., consisting primarily of Tyr, Trp, or Phe). The peptide moiety can be a dendrimer peptide, constrained peptide or crosslinked peptide. In another alternative, the peptide moiety can include a hydrophobic membrane translocation sequence (MTS). An exemplary hydrophobic MTS-containing peptide is RFGF having the amino acid sequence AAVALLPAVLLALLAP (SEQ ID NO: 9). An RFGF analogue (e.g., amino acid sequence AALLPVLLAAP (SEQ ID NO: 10)) containing a hydrophobic MTS can also be a targeting moiety. The peptide moiety can be a “delivery” peptide, which can carry large polar molecules including peptides, oligonucleotides, and protein across cell membranes. For example, sequences from the HIV Tat protein (GRKKRRQRRRPPQ (SEQ ID NO: 11)) and the Drosophila Antennapedia protein (RQIKIWFQNRRMKWKK (SEQ ID NO: 12)) have been found to be capable of functioning as delivery peptides. A peptide or peptidomimetic can be encoded by a random sequence of DNA, such as a peptide identified from a phage-display library, or one-bead-one-compound (OBOC) combinatorial library (Lam et al., Nature, 354: 82-84, 1991). Typically, the peptide or peptidomimetic tethered to a dsRNA agent via an incorporated monomer unit is a cell targeting peptide such as an arginine-glycine-aspartic acid (RGD)-peptide, or RGD mimic. A peptide moiety can range in length from about 5 amino acids to about 40 amino acids. The peptide moieties can have a structural modification, such as to increase stability or direct conformational properties. Any of the structural modifications described below can be utilized.

[0586] An RGD peptide for use in the compositions and methods of the disclosure may be linear or cyclic, and may be modified, e.g., glycosylated or methylated, to facilitate targeting to a specific tissue(s). RGD-containing peptides and peptidiomimemtics may include D-amino acids, as well as synthetic RGD mimics. In addition to RGD, one can use other moieties that target the integrin ligand. Preferred conjugates of this ligand target PECAM-1 or VEGF.

[0587] An RGD peptide moiety can be used to target a particular cell type, e.g., a tumor cell, such as an endothelial tumor cell or a breast cancer tumor cell (Zitzmann et al., Cancer Res., 62: 5139-43, 2002). An RGD peptide can facilitate targeting of an dsRNA agent to tumors of a variety of other tissues, including the lung, kidney, spleen, or liver (Aoki et al., Cancer Gene Therapy 8: 783-787, 2001). Typically, the RGD peptide will facilitate targeting of an iRNA agent to the kidney. The RGD peptide can be linear or cyclic, and can be modified, e.g., glycosylated or methylated to facilitate targeting to specific tissues. For example, a glycosylated RGD peptide can deliver an iRNA agent to a tumor cell expressing αvβ₃ (Haubner et al., Jour. Nucl. Med., 42: 326-336, 2001).

[0588] A “cell permeation peptide” is capable of permeating a cell, e.g., a microbial cell, such as a bacterial or fungal cell, or a mammalian cell, such as a human cell. A microbial cell-permeating peptide can be, for example, an α-helical linear peptide (e.g., LL-37 or Ceropin P1), a disulfide bond-containing peptide (e.g., α-defensin, β-defensin or bactenecin), or a peptide containing only one or two dominating amino acids (e.g., PR-39 or indolicidin). A cell permeation peptide can also include a nuclear localization signal (NLS). For example, a cell permeation peptide can be a bipartite amphipathic peptide, such as MPG, which is derived from the fusion peptide domain of HIV-1 gp41 and the NLS of SV40 large T antigen (Simeoni et al., Nucl. Acids Res. 31: 2717-2724, 2003).

[0589] C. Carbohydrate Conjugates

[0590] In some embodiments of the compositions and methods of the disclosure, an iRNA further comprises a carbohydrate. The carbohydrate conjugated iRNA are advantageous for the in vivo delivery of nucleic acids, as well as compositions suitable for in vivo therapeutic use, as described herein. As used herein, “carbohydrate” refers to a compound which is either a carbohydrate per se made up of one or more monosaccharide units having at least 6 carbon atoms (which can be linear, branched or cyclic) with an oxygen, nitrogen or sulfur atom bonded to each carbon atom; or a compound having as a part thereof a carbohydrate moiety made up of one or more monosaccharide units each having at least six carbon atoms (which can be linear, branched or cyclic), with an oxygen, nitrogen or sulfur atom bonded to each carbon atom. Representative carbohydrates include the sugars (mono-, di-, tri- and oligosaccharides containing from about 4, 5, 6, 7, 8, or 9 monosaccharide units), and polysaccharides such as starches, glycogen, cellulose and polysaccharide gums. Specific monosaccharides include C5 and above (e.g., C5, C6, C7, or C8) sugars; di- and tri-saccharides include sugars having two or three monosaccharide units (e.g., C5, C6, C7, or C8).

[0591] In certain embodiments, a carbohydrate conjugate comprises a monosaccharide.

[0592] In certain embodiments, the monosaccharide is an N-acetylgalactosamine (GalNAc). GalNAc conjugates, which comprise one or more N-acetylgalactosamine (GalNAc) derivatives, are described, for example, in U.S. Pat. No. 8,106,022, the entire content of which is hereby incorporated herein by reference. In some embodiments, the GalNAc conjugate serves as a ligand that targets the iRNA to particular cells. In some embodiments, the GalNAc conjugate targets the iRNA to liver cells, e.g., by serving as a ligand for the asialoglycoprotein receptor of liver cells (e.g., hepatocytes).

[0593] In some embodiments, the carbohydrate conjugate comprises one or more GalNAc derivatives. The GalNAc derivatives may be attached via a linker, e.g., a bivalent or trivalent branched linker. In some embodiments the GalNAc conjugate is conjugated to the 3′ end of the sense strand. In some embodiments, the GalNAc conjugate is conjugated to the iRNA agent (e.g., to the 3′ end of the sense strand) via a linker, e.g., a linker as described herein. In some embodiments the GalNAc conjugate is conjugated to the 5′ end of the sense strand. In some embodiments, the GalNAc conjugate is conjugated to the iRNA agent (e.g., to the 5′ end of the sense strand) via a linker, e.g., a linker as described herein.

[0594] In certain embodiments of the disclosure, the GalNAc or GalNAc derivative is attached to an iRNA agent of the disclosure via a monovalent linker. In some embodiments, the GalNAc or GalNAc derivative is attached to an iRNA agent of the disclosure via a bivalent linker. In yet other embodiments of the disclosure, the GalNAc or GalNAc derivative is attached to an iRNA agent of the disclosure via a trivalent linker. In other embodiments of the disclosure, the GalNAc or GalNAc derivative is attached to an iRNA agent of the disclosure via a tetravalent linker.

[0595] In certain embodiments, the double stranded RNAi agents of the disclosure comprise one GalNAc or GalNAc derivative attached to the iRNA agent. In certain embodiments, the double stranded RNAi agents of the disclosure comprise a plurality (e.g., 2, 3, 4, 5, or 6) GalNAc or GalNAc derivatives, each independently attached to a plurality of nucleotides of the double stranded RNAi agent through a plurality of monovalent linkers.

[0596] In some embodiments, for example, when the two strands of an iRNA agent of the disclosure are part of one larger molecule connected by an uninterrupted chain of nucleotides between the 3′-end of one strand and the 5′-end of the respective other strand forming a hairpin loop comprising, a plurality of unpaired nucleotides, each unpaired nucleotide within the hairpin loop may independently comprise a GalNAc or GalNAc derivative attached via a monovalent linker. The hairpin loop may also be formed by an extended overhang in one strand of the duplex.

[0597] In some embodiments, for example, when the two strands of an iRNA agent of the disclosure are part of one larger molecule connected by an uninterrupted chain of nucleotides between the 3′-end of one strand and the 5′-end of the respective other strand forming a hairpin loop comprising, a plurality of unpaired nucleotides, each unpaired nucleotide within the hairpin loop may independently comprise a GalNAc or GalNAc derivative attached via a monovalent linker. The hairpin loop may also be formed by an extended overhang in one strand of the duplex.

[0598] In some embodiments, the GalNAc conjugate is

[chemical structure]

[0599] In some embodiments, the RNAi agent is attached to the carbohydrate conjugate via a linker as shown in the following schematic, wherein X is O or S

[chemical structure]

[0600] In some embodiments, the RNAi agent is conjugated to L96 as defined in Table 1 and shown below:

[chemical structure]

[0601] In certain embodiments, a carbohydrate conjugate for use in the compositions and methods of the disclosure is selected from the group consisting of:

[chemical structure]

[chemical structure]

[chemical structure]

[chemical structure]

[chemical structure]

[chemical structure]

[chemical structure]

[chemical structure]

[chemical structure]

[0602] In certain embodiments, a carbohydrate conjugate for use in the compositions and methods of the disclosure is a monosaccharide. In certain embodiments, the monosaccharide is an N-acetylgalactosamine, such as

[chemical structure]

[0603] Another representative carbohydrate conjugate for use in the embodiments described herein includes, but is not limited to,

[chemical structure]

[0604] when one of X or Y is an oligonucleotide, the other is a hydrogen.

[0605] In some embodiments, a suitable ligand is a ligand disclosed in WO 2019/055633, the entire contents of which are incorporated herein by reference. In one embodiment the ligand comprises the structure below:

[chemical structure]

[0606] In certain embodiments, the RNAi agents of the disclosure may include GalNAc ligands, even if such GalNAc ligands are currently projected to be of limited value for the preferred intrathecal/CNS delivery route(s) of the instant disclosure.

[0607] In certain embodiments of the disclosure, the GalNAc or GalNAc derivative is attached to an iRNA agent of the disclosure via a monovalent linker. In some embodiments, the GalNAc or GalNAc derivative is attached to an iRNA agent of the disclosure via a bivalent linker. In yet other embodiments of the disclosure, the GalNAc or GalNAc derivative is attached to an iRNA agent of the disclosure via a trivalent linker. In other embodiments of the disclosure, the GalNAc or GalNAc derivative is attached to an iRNA agent of the disclosure via a tetravalent linker.

[0608] In certain embodiments, the double stranded RNAi agents of the disclosure comprise one GalNAc or GalNAc derivative attached to the iRNA agent, e.g., the 5′end of the sense strand of a dsRNA agent, or the 5′ end of one or both sense strands of a dual targeting RNAi agent as described herein. In certain embodiments, the double stranded RNAi agents of the disclosure comprise a plurality (e.g., 2, 3, 4, 5, or 6) GalNAc or GalNAc derivatives, each independently attached to a plurality of nucleotides of the double stranded RNAi agent through a plurality of monovalent linkers.

[0609] In some embodiments, for example, when the two strands of an iRNA agent of the disclosure are part of one larger molecule connected by an uninterrupted chain of nucleotides between the 3′-end of one strand and the 5′-end of the respective other strand forming a hairpin loop comprising, a plurality of unpaired nucleotides, each unpaired nucleotide within the hairpin loop may independently comprise a GalNAc or GalNAc derivative attached via a monovalent linker.

[0610] In some embodiments, the carbohydrate conjugate further comprises one or more additional ligands as described above, such as, but not limited to, a PK modulator or a cell permeation peptide.

[0611] Additional carbohydrate conjugates and linkers suitable for use in the present disclosure include those described in WO 2014/179620 and WO 2014/179627, the entire contents of each of which are incorporated herein by reference.

[0612] D. Linkers

[0613] In some embodiments, the conjugate or ligand described herein can be attached to an iRNA oligonucleotide with various linkers that can be cleavable or non-cleavable.

[0614] The term “linker” or “linking group” means an organic moiety that connects two parts of a compound, e.g., covalently attaches two parts of a compound. Linkers typically comprise a direct bond or an atom such as oxygen or sulfur, a unit such as NR8, C(O), C(O)NH, SO, SO₂, SO₂NH or a chain of atoms, such as, but not limited to, substituted or unsubstituted alkyl, substituted or unsubstituted alkenyl, substituted or unsubstituted alkynyl, arylalkyl, arylalkenyl, arylalkynyl, heteroarylalkyl, heteroarylalkenyl, heteroarylalkynyl, heterocyclylalkyl, heterocyclylalkenyl, heterocyclylalkynyl, aryl, heteroaryl, heterocyclyl, cycloalkyl, cycloalkenyl, alkylarylalkyl, alkylarylalkenyl, alkylarylalkynyl, alkenylarylalkyl, alkenylarylalkenyl, alkenylarylalkynyl, alkynylarylalkyl, alkynylarylalkenyl, alkynylarylalkynyl, alkylheteroarylalkyl, alkylheteroarylalkenyl, alkylheteroarylalkynyl, alkenylheteroarylalkyl, alkenylheteroarylalkenyl, alkenylheteroarylalkynyl, alkynylheteroarylalkyl, alkynylheteroarylalkenyl, alkynylheteroarylalkynyl, alkylheterocyclylalkyl, alkylheterocyclylalkenyl, alkylhererocyclylalkynyl, alkenylheterocyclylalkyl, alkenylheterocyclylalkenyl, alkenylheterocyclylalkynyl, alkynylheterocyclylalkyl, alkynylheterocyclylalkenyl, alkynylheterocyclylalkynyl, alkylaryl, alkenylaryl, alkynylaryl, alkylheteroaryl, alkenylheteroaryl, alkynylhereroaryl, which one or more methylenes can be interrupted or terminated by O, S, S(O), SO₂, N(R8), C(O), substituted or unsubstituted aryl, substituted or unsubstituted heteroaryl, substituted or unsubstituted heterocyclic; where R8 is hydrogen, acyl, aliphatic or substituted aliphatic. In certain embodiments, the linker is of a length of about 1-24 atoms, 2-24, 3-24, 4-24, 5-24, 6-24, 6-18, 7-18, 8-18 atoms, 7-17, 8-17, 6-16, 7-16, or 8-16 atoms.

[0615] A cleavable linking group is one which is sufficiently stable outside the cell, but which upon entry into a target cell is cleaved to release the two parts the linker is holding together. In a preferred embodiment, the cleavable linking group is cleaved at least about 10 times, 20, times, 30 times, 40 times, 50 times, 60 times, 70 times, 80 times, 90 times or more, or at least about 100 times faster in a target cell or under a first reference condition (which can, e.g., be selected to mimic or represent intracellular conditions) than in the blood of a subject, or under a second reference condition (which can, e.g., be selected to mimic or represent conditions found in the blood or serum).

[0616] Cleavable linking groups are susceptible to cleavage agents, e.g., pH, redox potential or the presence of degradative molecules. Generally, cleavage agents are more prevalent or found at higher levels or activities inside cells than in serum or blood. Examples of such degradative agents include: redox agents which are selected for particular substrates or which have no substrate specificity, including, e.g., oxidative or reductive enzymes or reductive agents such as mercaptans, present in cells, that can degrade a redox cleavable linking group by reduction; esterases; endosomes or agents that can create an acidic environment, e.g., those that result in a pH of five or lower; enzymes that can hydrolyze or degrade an acid cleavable linking group by acting as a general acid, peptidases (which can be substrate specific), and phosphatases.

[0617] A cleavable linkage group, such as a disulfide bond can be susceptible to pH. The pH of human serum is 7.4, while the average intracellular pH is slightly lower, ranging from about 7.1-7.3. Endosomes have a more acidic pH, in the range of 5.5-6.0, and lysosomes have an even more acidic pH at around 5.0. Some linkers will have a cleavable linking group that is cleaved at a preferred pH, thereby releasing a cationic lipid from the ligand inside the cell, or into the desired compartment of the cell.

[0618] A linker can include a cleavable linking group that is cleavable by a particular enzyme. The type of cleavable linking group incorporated into a linker can depend on the cell to be targeted. For example, a liver-targeting ligand can be linked to a cationic lipid through a linker that includes an ester group. Liver cells are rich in esterases, and therefore the linker will be cleaved more efficiently in liver cells than in cell types that are not esterase-rich. Other cell-types rich in esterases include cells of the lung, renal cortex, and testis.

[0619] Linkers that contain peptide bonds can be used when targeting cell types rich in peptidases, such as liver cells and synoviocytes.

[0620] In general, the suitability of a candidate cleavable linking group can be evaluated by testing the ability of a degradative agent (or condition) to cleave the candidate linking group. It will also be desirable to also test the candidate cleavable linking group for the ability to resist cleavage in the blood or when in contact with other non-target tissue. Thus, one can determine the relative susceptibility to cleavage between a first and a second condition, where the first is selected to be indicative of cleavage in a target cell and the second is selected to be indicative of cleavage in other tissues or biological fluids, e.g., blood or serum. The evaluations can be carried out in cell free systems, in cells, in cell culture, in organ or tissue culture, or in whole animals. It can be useful to make initial evaluations in cell-free or culture conditions and to confirm by further evaluations in whole animals. In preferred embodiments, useful candidate compounds are cleaved at least about 2, 4, 10, 20, 30, 40, 50, 60, 70, 80, 90, or about 100 times faster in the cell (or under in vitro conditions selected to mimic intracellular conditions) as compared to blood or serum (or under in vitro conditions selected to mimic extracellular conditions).

[0621] i. Redox Cleavable Linking Groups

[0622] In certain embodiments, a cleavable linking group is a redox cleavable linking group that is cleaved upon reduction or oxidation. An example of reductively cleavable linking group is a disulphide linking group (—S—S—). To determine if a candidate cleavable linking group is a suitable “reductively cleavable linking group,” or for example is suitable for use with a particular iRNA moiety and particular targeting agent one can look to methods described herein. For example, a candidate can be evaluated by incubation with dithiothreitol (DTT), or other reducing agent using reagents know in the art, which mimic the rate of cleavage which would be observed in a cell, e.g., a target cell. The candidates can also be evaluated under conditions which are selected to mimic blood or serum conditions. In one, candidate compounds are cleaved by at most about 10% in the blood. In other embodiments, useful candidate compounds are degraded at least about 2, 4, 10, 20, 30, 40, 50, 60, 70, 80, 90, or about 100 times faster in the cell (or under in vitro conditions selected to mimic intracellular conditions) as compared to blood (or under in vitro conditions selected to mimic extracellular conditions). The rate of cleavage of candidate compounds can be determined using standard enzyme kinetics assays under conditions chosen to mimic intracellular media and compared to conditions chosen to mimic extracellular media.

[0623] ii. Phosphate-Based Cleavable Linking Groups

[0624] In certain embodiments, a cleavable linker comprises a phosphate-based cleavable linking group. A phosphate-based cleavable linking group is cleaved by agents that degrade or hydrolyze the phosphate group. An example of an agent that cleaves phosphate groups in cells are enzymes such as phosphatases in cells. Examples of phosphate-based linking groups are —O—P(O)(ORk)-O—, —O—P(S)(ORk)-O—, —O—P(S)(SRk)-O—, —S—P(O)(ORk)-O—, —O—P(O)(ORk)-S—, —S—P(O)(ORk)-S—, —O—P(S)(ORk)-S—, —S—P(S)(ORk)-O—, —O—P(O)(Rk)-O—, —O—P(S)(Rk)-O—, —S—P(O)(Rk)-O—, —S—P(S)(Rk)-O—, —S—P(O)(Rk)-S—, —O—P(S)(Rk)-S. Preferred embodiments are —O—P(O)(OH)—O—, —O—P(S)(OH)—O—, —O—P(S)(SH)—O—, —S—P(O)(OH)—O—, —O—P(O)(OH)—S—, —S—P(O)(OH)—S—, —O—P(S)(OH)—S—, —S—P(S)(OH)—O—, —O—P(O)(H)—O—, —O—P(S)(H)—O—, —S—P(O)(H)—O, —S—P(S)(H)—O—, —S—P(O)(H)—S—, —O—P(S)(H)—S—. A preferred embodiment is —O—P(O)(OH)—O—. These candidates can be evaluated using methods analogous to those described above.

[0625] iii. Acid Cleavable Linking Groups

[0626] In certain embodiments, a cleavable linker comprises an acid cleavable linking group. An acid cleavable linking group is a linking group that is cleaved under acidic conditions. In preferred embodiments acid cleavable linking groups are cleaved in an acidic environment with a pH of about 6.5 or lower (e.g., about 6.0, 5.75, 5.5, 5.25, 5.0, or lower), or by agents such as enzymes that can act as a general acid. In a cell, specific low pH organelles, such as endosomes and lysosomes can provide a cleaving environment for acid cleavable linking groups. Examples of acid cleavable linking groups include but are not limited to hydrazones, esters, and esters of amino acids. Acid cleavable groups can have the general formula —C═NN—, C(O)O, or —OC(O). A preferred embodiment is when the carbon attached to the oxygen of the ester (the alkoxy group) is an aryl group, substituted alkyl group, or tertiary alkyl group such as dimethyl pentyl or t-butyl. These candidates can be evaluated using methods analogous to those described above.

[0627] iv. Ester-Based Cleavable Linking Groups

[0628] In certain embodiments, a cleavable linker comprises an ester-based cleavable linking group. An ester-based cleavable linking group is cleaved by enzymes such as esterases and amidases in cells. Examples of ester-based cleavable linking groups include but are not limited to esters of alkylene, alkenylene and alkynylene groups. Ester cleavable linking groups have the general formula —C(O)O—, or —OC(O)—. These candidates can be evaluated using methods analogous to those described above.

[0629] v. Peptide-Based Cleavable Linking Groups

[0630] In yet another embodiment, a cleavable linker comprises a peptide-based cleavable linking group. A peptide-based cleavable linking group is cleaved by enzymes such as peptidases and proteases in cells. Peptide-based cleavable linking groups are peptide bonds formed between amino acids to yield oligopeptides (e.g., dipeptides, tripeptides etc.) and polypeptides. Peptide-based cleavable groups do not include the amide group (—C(O)NH—). The amide group can be formed between any alkylene, alkenylene or alkynelene. A peptide bond is a special type of amide bond formed between amino acids to yield peptides and proteins. The peptide-based cleavage group is generally limited to the peptide bond (i.e., the amide bond) formed between amino acids yielding peptides and proteins and does not include the entire amide functional group. Peptide-based cleavable linking groups have the general formula —NHCHRAC(O)NHCHRBC(O)—, where RA and RB are the R groups of the two adjacent amino acids. These candidates can be evaluated using methods analogous to those described above.

[0631] In some embodiments, an iRNA of the disclosure is conjugated to a carbohydrate through a linker. Non-limiting examples of iRNA carbohydrate conjugates with linkers of the compositions and methods of the disclosure include, but are not limited to,

[chemical structure]

[chemical structure]

[chemical structure]

(Formula XLIV), when one of X or Y is an oligonucleotide, the other is a hydrogen.

[0632] In certain embodiments of the compositions and methods of the disclosure, a ligand is one or more “GalNAc” (N-acetylgalactosamine) derivatives attached through a bivalent or trivalent branched linker.

[0633] In certain embodiments, a dsRNA of the disclosure is conjugated to a bivalent or trivalent branched linker selected from the group of structures shown in any of formula (XLV)-(XLVI):

[chemical structure]

[0634] wherein:
[0635] q2A, q2B, q3A, q3B, q4A, q4B, q5A, q5B and q5C represent independently for each occurrence 0-20 and wherein the repeating unit can be the same or different;
[0636] P^{2A}, P^{2B}, P^{3A}, P^{3B}, P^{4A}, P^{4B}, P^{5A}, P^{5B}, P^{5C}, T^{2A}, T^{2B}, T^{3A}, T^{3B}, T^{4A}, T^{4B}, T^{4A}, T^{5B}, T^{5C} are each independently for each occurrence absent, CO, NH, O, S, OC(O), NHC(O), CH2, CH2NH or CH₂O;
[0637] Q^{2A}, Q^{2B}, Q^{3A}, Q^{3B}, Q^{4A}, Q^{4B}, Q^{5A}, Q^{5B}, Q^{5C} are independently for each occurrence absent, alkylene, substituted alkylene wherein one or more methylenes can be interrupted or terminated by one or more of O, S, S(O), SO₂, N(R^{N}), C(R′)═C(R″), C≡C or C(O);
[0638] R^{2A}, R^{2B}, R^{3A}, R^{3B}, R^{4A}, R^{4B}, R⁵A, R^{5B}, R^{5C} are each independently for each occurrence absent, NH, O, S, CH2, C(O)O, C(O)NH, NHCH(R^{a})C(O), —C(O)—CH(R^{a})—NH—, CO, CH═N—O,

[chemical structure]

[0639] L^{2A}, L^{2B}, L^{3A} L^{3B} L^{4A} L^{4B} L^{5A} L^{5B} and L^{5C} represent the ligand; i.e. each independently for each occurrence a monosaccharide (such as GalNAc), disaccharide, trisaccharide, tetrasaccharide, oligosaccharide, or polysaccharide; and R^{a} is H or amino acid side chain. Trivalent conjugating GalNAc derivatives are particularly useful for use with RNAi agents for inhibiting the expression of a target gene, such as those of formula (XLIX):

[chemical structure]

[0640] wherein L^{5A} L^{5B} and L^{5C} represent a monosaccharide, such as GalNAc derivative.

[0641] Examples of suitable bivalent and trivalent branched linker groups conjugating GalNAc derivatives include, but are not limited to, the structures recited above as formulas II, VII, XI, X, and XIII.

[0642] Representative U.S. Patents that teach the preparation of RNA conjugates include, but are not limited to, U.S. Pat. Nos. 4,828,979; 4,948,882; 5,218,105; 5,525,465; 5,541,313; 5,545,730; 5,552,538; 5,578,717, 5,580,731; 5,591,584; 5,109,124; 5,118,802; 5,138,045; 5,414,077; 5,486,603; 5,512,439; 5,578,718; 5,608,046; 4,587,044; 4,605,735; 4,667,025; 4,762,779; 4,789,737; 4,824,941; 4,835,263; 4,876,335; 4,904,582; 4,958,013; 5,082,830; 5,112,963; 5,214,136; 5,082,830; 5,112,963; 5,214,136; 5,245,022; 5,254,469; 5,258,506; 5,262,536; 5,272,250; 5,292,873; 5,317,098; 5,371,241, 5,391,723; 5,416,203, 5,451,463; 5,510,475; 5,512,667; 5,514,785; 5,565,552; 5,567,810; 5,574,142; 5,585,481; 5,587,371; 5,595,726; 5,597,696; 5,599,923; 5,599,928; 5,688,941; 6,294,664; 6,320,017; 6,576,752; 6,783,931; 6,900,297; 7,037,646; and 8,106,022, the entire contents of each of which are hereby incorporated herein by reference.

[0643] It is not necessary for all positions in a given compound to be uniformly modified, and in fact more than one of the aforementioned modifications can be incorporated in a single compound or even at a single nucleoside within an iRNA. The present disclosure also includes iRNA compounds that are chimeric compounds.

[0644] “Chimeric” iRNA compounds or “chimeras,” in the context of this disclosure, are iRNA compounds, optionally dsRNA agents, that contain two or more chemically distinct regions, each made up of at least one monomer unit, i.e., a nucleotide in the case of a dsRNA compound. These iRNAs typically contain at least one region wherein the RNA is modified so as to confer upon the iRNA increased resistance to nuclease degradation, increased cellular uptake, or increased binding affinity for the target nucleic acid. An additional region of the iRNA can serve as a substrate for enzymes capable of cleaving RNA: DNA or RNA: RNA hybrids. By way of example, RNase H is a cellular endonuclease which cleaves the RNA strand of an RNA: DNA duplex. Activation of RNase H, therefore, results in cleavage of the RNA target, thereby greatly enhancing the efficiency of iRNA inhibition of gene expression. Consequently, comparable results can often be obtained with shorter iRNAs when chimeric dsRNAs are used, compared to phosphorothioate deoxy dsRNAs hybridizing to the same target region. Cleavage of the RNA target can be routinely detected by gel electrophoresis and, if necessary, associated nucleic acid hybridization techniques known in the art.

[0645] In certain instances, the RNA of an iRNA can be modified by a non-ligand group. A number of non-ligand molecules have been conjugated to iRNAs in order to enhance the activity, cellular distribution or cellular uptake of the iRNA, and procedures for performing such conjugations are available in the scientific literature. Such non-ligand moieties have included lipid moieties, such as cholesterol (Kubo, T. et al., Biochem. Biophys. Res. Comm., 2007, 365(1): 54-61; Letsinger et al., Proc. Natl. Acad. Sci. USA, 1989, 86: 6553), cholic acid (Manoharan et al., Bioorg. Med. Chem. Lett., 1994, 4: 1053), a thioether, e.g., hexyl-S-tritylthiol (Manoharan et al., Ann. N.Y. Acad. Sci., 1992, 660: 306; Manoharan et al., Bioorg. Med. Chem. Let., 1993, 3: 2765), a thiocholesterol (Oberhauser et al., Nucl. Acids Res., 1992, 20: 533), an aliphatic chain, e.g., dodecandiol or undecyl residues (Saison-Behmoaras et al., EMBO J., 1991, 10: 111; Kabanov et al., FEBS Lett., 1990, 259: 327; Svinarchuk et al., Biochimie, 1993, 75: 49), a phospholipid, e.g., di-hexadecyl-rac-glycerol or triethylammonium 1,2-di-O-hexadecyl-rac-glycero-3-H-phosphonate (Manoharan et al., Tetrahedron Lett., 1995, 36: 3651; Shea et al., Nucl. Acids Res., 1990, 18: 3777), a polyamine or a polyethylene glycol chain (Manoharan et al., Nucleosides & Nucleotides, 1995, 14: 969), or adamantane acetic acid (Manoharan et al., Tetrahedron Lett., 1995, 36: 3651), a palmityl moiety (Mishra et al., Biochim. Biophys. Acta, 1995, 1264: 229), or an octadecylamine or hexylamino-carbonyl-oxycholesterol moiety (Crooke et al., J. Pharmacol. Exp. Ther., 1996, 277: 923). Representative United States patents that teach the preparation of such RNA conjugates have been listed above. Typical conjugation protocols involve the synthesis of RNAs bearing an aminolinker at one or more positions of the sequence. The amino group is then reacted with the molecule being conjugated using appropriate coupling or activating reagents. The conjugation reaction can be performed either with the RNA still bound to the solid support or following cleavage of the RNA, in solution phase. Purification of the RNA conjugate by HPLC typically affords the pure conjugate.

[0646] IV. In Vivo Testing of SNCA Knockdown

[0647] A wide variety of α-synuclein PD animal models are available (Gómez-Benito et al. Front Pharmacol. 11: 356). A number of rodent models of PD rely upon intracerebral or systemic administration of either α-synuclein pre-formed fibrils (PFFs) or brain extracts containing Lewy bodies and α-synuclein derived from PD patients or transgenic mice exhibiting α-synuclein pathology. More relevant to assessment of SNCA RNAi agents, genetic models of PD have also been made. Recombinant adeno-associated virus vectors (rAAV) overexpressing the SNCA gene have been used to model PD: overexpression of wild type α-synuclein or PD-associated mutants (A53T or A30P α-synuclein) utilizing rAAV has been described as leading to a progressive loss of dopaminergic neurons in the substantia nigra pars compacta (SNc), a loss of dopamine terminals in the striatum (Koprich et al. Mol Neurodegener. 5: 43; Koprich et al. PLoS One. 6: e17698; Oliveras-Salvi et al. Mol Neurodegener. 8: 44; Bourdenx et al. Acta Neuropathol Commun. 3: 46; Caudal et al. Exp Neurol. 273: 243-52; Lu et al. Biochem Biophys Res Commun. 464: 988-993; Ip et al. Biochem Biophys Res Commun. 464: 988-993), and a reduction of striatal dopamine content (Koprich et al. PLoS One. 6: e17698; Ip et al.). However, the extent of neurodegeneration achieved with the rAAV model has been variable among the different studies. Several serotypes, promoters, α-synuclein species, doses, and time-course after injection have been tested, and all these factors influence the parkinsonian phenotype achieved.

[0648] Several transgenic mice lines expressing E46K α-synuclein have also been generated (Emmer et al. J Biol Chem. 286: 35104-18; Nuber et al. Neuron. 100: 75-90.e5), while E46K human α-synuclein has been overexpressed using viral vectors in mice. In the rAAV-α-synuclein model, the presence of pα-synuclein inclusions in the nigrostriatal system is concomitant with a significant loss of nigral dopaminergic neurons and the reduction in tyrosine hydroxylase immunoreactivity in the striatum. Overexpression of wild type or A53T human α-synuclein induces a progressive loss of dopaminergic neurons in the SN over time (Oliveras-Salvi et al. Mol Neurodegener. 8: 44).

[0649] Some studies have shown that rAAV-α-synuclein expression causes the development of motor alterations, such as an increased apomorphine or amphetamine-induced rotation, defects in the stepping test or increased forepaw asymmetry in the cylinder test (Kirik et al. JNeurosci. 22: 2780-91; Decressac et al. Brain. 134(Pt 8): 2302-11; Koprich et al. PLoS One. 6: e17698; Decressac et al. Neurobiol Dis. 45: 939-53; Gaugler et al. Acta Neuropathol. 123: 653-69; Gombash et al. PLoS One. 8: e81426; Oliveras-Salvi et al. Mol Neurodegener. 8: 44; Bourdenx et al. Acta Neuropathol Commun. 3: 46; Caudal et al. Exp Neurol. 273: 243-52; Ip et al. Biochem Biophys Res Commun. 464: 988-993). These motor deficits appear several weeks after injection in animals with a significant loss of dopaminergic neurons.

[0650] Such models have been used to develop and evaluate potential therapies aimed at reducing the aggregation of α-synuclein and preventing against neurodegeneration induced by α-synuclein (Decressac et al. Proc Natl Acad Sci USA. 110: E1817-26; Xilouri et al. Autophagy. 9: 2166-8; Rocha et al. Neurobiol Dis. 82: 495-503), and can further be used to demonstrate the in vivo efficacy of the RNAi agents provided herein. Such models may contain constitutive or inducible expression, e.g., overexpression, of, for example, human or rat SNCA, in some instances comprising a pathogenic mutation. Examples of overexpression models used herein include AAV induced expression of the full-length Homo sapiens SNCA transcript Hs00240906_ml and 3′ UTR, and AAV induced expression of the full-length Rattus norvegicus SNCA transcript NM_019169.2 and 3′ UTR.

[0651] V. Delivery of an RNAi Agent of the Disclosure

[0652] The delivery of an RNAi agent of the disclosure to a cell e.g., a cell within a subject, such as a human subject (e.g., a subject in need thereof, such as a subject having a SNCA-associated disorder, e.g., PD, multiple system atrophy, Lewy body dementia (LBD), etc., can be achieved in a number of different ways. For example, delivery may be performed by contacting a cell with an RNAi agent of the disclosure either in vitro or in vivo. In vivo delivery may also be performed directly by administering a composition comprising an RNAi agent, e.g., a dsRNA, to a subject. Alternatively, in vivo delivery may be performed indirectly by administering one or more vectors that encode and direct the expression of the RNAi agent. These alternatives are discussed further below.

[0653] In general, any method of delivering a nucleic acid molecule (in vitro or in vivo) can be adapted for use with an RNAi agent of the disclosure (see e.g., Akhtar S. and Julian R L., (1992) Trends Cell. Biol. 2(5): 139-144 and WO94/02595, which are incorporated herein by reference in their entireties). For in vivo delivery, factors to consider for delivering an RNAi agent include, for example, biological stability of the delivered agent, prevention of non-specific effects, and accumulation of the delivered agent in the target tissue. The non-specific effects of an RNAi agent can be minimized by local administration, for example, by direct injection or implantation into a tissue or topically administering the preparation. Local administration to a treatment site maximizes local concentration of the agent, limits the exposure of the agent to systemic tissues that can otherwise be harmed by the agent or that can degrade the agent, and permits a lower total dose of the RNAi agent to be administered. Several studies have shown successful knockdown of gene products when an RNAi agent is administered locally. For example, intraocular delivery of a VEGF dsRNA by intravitreal injection in cynomolgus monkeys (Tolentino, M J. et al., (2004) Retina 24: 132-138) and subretinal injections in mice (Reich, S J. et al. (2003) Mol. Vis. 9: 210-216) were both shown to prevent neovascularization in an experimental model of age-related macular degeneration. In addition, direct intratumoral injection of a dsRNA in mice reduces tumor volume (Pille, J. et al. (2005)Mol. Ther. 11: 267-274) and can prolong survival of tumor-bearing mice (Kim, W J. et al., (2006) Mol. Ther. 14: 343-350; Li, S. et al., (2007) Mol. Ther. 15: 515-523). RNA interference has also shown success with local delivery to the CNS by direct injection (Dorn, G. et al., (2004) Nucleic Acids 32: e49; Tan, P H. et al. (2005) Gene Ther. 12: 59-66; Makimura, H. et al. (2002) BMC Neurosci. 3: 18; Shishkina, G T., et al. (2004) Neuroscience 129: 521-528; Thakker, E R., et al. (2004) Proc. Natl. Acad. Sci. U.S.A. 101: 17270-17275; Akaneya, Y., et al. (2005) J. Neurophysiol. 93: 594-602) and to the lungs by intranasal administration (Howard, K A. et al., (2006) Mol. Ther. 14: 476-484; Zhang, X. et al., (2004) J. Biol. Chem. 279: 10677-10684; Bitko, V. et al., (2005) Nat. Med. 11: 50-55). For administering an RNAi agent systemically for the treatment of a disease, the RNA can be modified or alternatively delivered using a drug delivery system; both methods act to prevent the rapid degradation of the dsRNA by endo- and exo-nucleases in vivo. Modification of the RNA or the pharmaceutical carrier can also permit targeting of the RNAi agent to the target tissue and avoid undesirable off-target effects (e.g., without wishing to be bound by theory, use of GNAs as described herein has been identified to destabilize the seed region of a dsRNA, resulting in enhanced preference of such dsRNAs for on-target effectiveness, relative to off-target effects, as such off-target effects are significantly weakened by such seed region destabilization). RNAi agents can be modified by chemical conjugation to lipophilic groups such as cholesterol to enhance cellular uptake and prevent degradation. For example, an RNAi agent directed against ApoB conjugated to a lipophilic cholesterol moiety was injected systemically into mice and resulted in knockdown of apoB mRNA in both the liver and jejunum (Soutschek, J. et al., (2004) Nature 432: 173-178). Conjugation of an RNAi agent to an aptamer has been shown to inhibit tumor growth and mediate tumor regression in a mouse model of prostate cancer (McNamara, J O. et al., (2006) Nat. Biotechnol. 24: 1005-1015). In an alternative embodiment, the RNAi agent can be delivered using drug delivery systems such as a nanoparticle, a dendrimer, a polymer, liposomes, or a cationic delivery system. Positively charged cationic delivery systems facilitate binding of molecule RNAi agent (negatively charged) and also enhance interactions at the negatively charged cell membrane to permit efficient uptake of an RNAi agent by the cell. Cationic lipids, dendrimers, or polymers can either be bound to an RNAi agent, or induced to form a vesicle or micelle (see e.g., Kim S H. et al., (2008) Journal of Controlled Release 129(2): 107-116) that encases an RNAi agent. The formation of vesicles or micelles further prevents degradation of the RNAi agent when administered systemically. Methods for making and administering cationic-RNAi agent complexes are well within the abilities of one skilled in the art (see e.g., Sorensen, D R., et al. (2003) J. Mol. Biol 327: 761-766; Verma, U N. et al., (2003) Clin. Cancer Res. 9: 1291-1300; Arnold, A S et al. (2007) J. Hypertens. 25: 197-205, which are incorporated herein by reference in their entirety). Some non-limiting examples of drug delivery systems useful for systemic delivery of RNAi agents include DOTAP (Sorensen, D R., et al (2003), supra; Verma, U N. et al., (2003), supra), Oligofectamine, “solid nucleic acid lipid particles” (Zimmermann, T S. et al., (2006) Nature 441: 111-114), cardiolipin (Chien, P Y. et al., (2005) Cancer Gene Ther. 12: 321-328; Pal, A. et al., (2005) Int J. Oncol. 26: 1087-1091), polyethyleneimine (Bonnet M E. et al., (2008) Pharm. Res. August 16 Epub ahead of print; Aigner, A. (2006) J. Biomed. Biotechnol. 71659), Arg-Gly-Asp (RGD) peptides (Liu, S. (2006) Mol. Pharm. 3: 472-487), and polyamidoamines (Tomalia, D A. et al., (2007) Biochem. Soc. Trans. 35: 61-67; Yoo, H. et al., (1999) Pharm. Res. 16: 1799-1804). In some embodiments, an RNAi agent forms a complex with cyclodextrin for systemic administration. Methods for administration and pharmaceutical compositions of RNAi agents and cyclodextrins can be found in U.S. Pat. No. 7,427,605, which is herein incorporated by reference in its entirety.

[0654] Certain aspects of the instant disclosure relate to a method of reducing the expression of a SNCA target gene in a cell, comprising contacting said cell with the double-stranded RNAi agent of the disclosure. In one embodiment, the cell is a hepatic cell, optionally a hepatocyte. In one embodiment, the cell is an extrahepatic cell, optionally a CNS cell.

[0655] Another aspect of the disclosure relates to a method of reducing the expression of a SNCA target gene in a subject, comprising administering to the subject the double-stranded RNAi agent of the disclosure.

[0656] Another aspect of the disclosure relates to a method of treating a subject having a SNCA-associated disorder, comprising administering to the subject a therapeutically effective amount of the double-stranded RNAi agent of the disclosure, thereby treating the subject. Exemplary CNS disorders that can be treated by the method of the disclosure include synucleinopathies, such as PD, multiple system atrophy, Lewy body dementia (LBD), pure autonomic failure (PAF), Pick's disease, progressive supranuclear palsy, dementia pugilistica, parkinsonism linked to chromosome 17, Lytico-Bodig disease, tangle predominant dementia, Argyrophilic grain disease, ganglioglioma, gangliocytoma, meningioangiomatosis, subacute sclerosing panencephalitis, lead encephalopathy, tuberous sclerosis, Hallervorden-Spatz disease, lipofuscinosis, corticobasal degeneration, frontotemporal dementia, frontotemporal lobar degeneration, Alzheimer's disease, Huntington's disease, Down's syndrome, psychosis, schizophrenia and Creutzfeldt-Jakob disease.

[0657] In one embodiment, the double-stranded RNAi agent is administered subcutaneously.

[0658] In one embodiment, the double-stranded RNAi agent is administered intrathecally. By intrathecal administration of the double-stranded RNAi agent, the method can reduce the expression of a SNCA target gene in a brain (e.g., striatum) or spine tissue, for instance, cortex, cerebellum, cervical spine, lumbar spine, and thoracic spine.

[0659] For ease of exposition the formulations, compositions and methods in this section are discussed largely with regard to modified siRNA compounds. It may be understood, however, that these formulations, compositions and methods can be practiced with other siRNA compounds, e.g., unmodified siRNA compounds, and such practice is within the disclosure. A composition that includes an RNAi agent can be delivered to a subject by a variety of routes. Exemplary routes include: intrathecal, intravenous, topical, rectal, anal, vaginal, nasal, pulmonary, and ocular.

[0660] The RNAi agents of the disclosure can be incorporated into pharmaceutical compositions suitable for administration. Such compositions typically include one or more species of RNAi agent and a pharmaceutically acceptable carrier. As used herein the language “pharmaceutically acceptable carrier” is intended to include any and all solvents, dispersion media, coatings, antibacterial and antifungal agents, isotonic and absorption delaying agents, and the like, compatible with pharmaceutical administration. The use of such media and agents for pharmaceutically active substances is well known in the art. Except insofar as any conventional media or agent is incompatible with the active compound, use thereof in the compositions is contemplated. Supplementary active compounds can also be incorporated into the compositions.

[0661] The pharmaceutical compositions of the present disclosure may be administered in a number of ways depending upon whether local or systemic treatment is desired and upon the area to be treated. Administration may be topical (including ophthalmic, vaginal, rectal, intranasal, transdermal), oral, or parenteral. Parenteral administration includes intravenous drip, subcutaneous, intraperitoneal or intramuscular injection, or intrathecal or intraventricular administration.

[0662] The route and site of administration may be chosen to enhance targeting. For example, to target muscle cells, intramuscular injection into the muscles of interest would be a logical choice. Lung cells might be targeted by administering the RNAi agent in aerosol form. The vascular endothelial cells could be targeted by coating a balloon catheter with the RNAi agent and mechanically introducing the RNA.

[0663] Formulations for topical administration may include transdermal patches, ointments, lotions, creams, gels, drops, suppositories, sprays, liquids, and powders. Conventional pharmaceutical carriers, aqueous, powder or oily bases, thickeners and the like may be necessary or desirable. Coated condoms, gloves and the like may also be useful.

[0664] Compositions for oral administration include powders or granules, suspensions or solutions in water, syrups, elixirs or non-aqueous media, tablets, capsules, lozenges, or troches. In the case of tablets, carriers that can be used include lactose, sodium citrate and salts of phosphoric acid. Various disintegrants such as starch, and lubricating agents such as magnesium stearate, sodium lauryl sulfate and talc, are commonly used in tablets. For oral administration in capsule form, useful diluents are lactose and high molecular weight polyethylene glycols. When aqueous suspensions are required for oral use, the nucleic acid compositions can be combined with emulsifying and suspending agents. If desired, certain sweetening or flavoring agents can be added.

[0665] Compositions for intrathecal or intraventricular administration may include sterile aqueous solutions which may also contain buffers, diluents, and other suitable additives.

[0666] Formulations for parenteral administration may include sterile aqueous solutions which may also contain buffers, diluents, and other suitable additives. Intraventricular injection may be facilitated by an intraventricular catheter, for example, attached to a reservoir. For intravenous use, the total concentration of solutes may be controlled to render the preparation isotonic.

[0667] In one embodiment, the administration of the siRNA compound, e.g., a double-stranded siRNA compound, or ssiRNA compound, composition is parenteral, e.g., intravenous (e.g., as a bolus or as a diffusible infusion), intradermal, intraperitoneal, intramuscular, intrathecal, intraventricular, intracranial, subcutaneous, transmucosal, buccal, sublingual, endoscopic, rectal, oral, vaginal, topical, pulmonary, intranasal, urethral, or ocular. Administration can be provided by the subject or by another person, e.g., a health care provider. The medication can be provided in measured doses or in a dispenser which delivers a metered dose. Selected modes of delivery are discussed in more detail below.

[0668] Intrathecal Administration

[0669] In one embodiment, the double-stranded RNAi agent is delivered by intrathecal injection (i.e., injection into the spinal fluid which bathes the brain and spinal cord tissue). Intrathecal injection of RNAi agents into the spinal fluid can be performed as a bolus injection or via minipumps which can be implanted beneath the skin, providing a regular and constant delivery of siRNA into the spinal fluid. The circulation of the spinal fluid from the choroid plexus, where it is produced, down around the spinal cord and dorsal root ganglia and subsequently up past the cerebellum and over the cortex to the arachnoid granulations, where the fluid can exit the CNS, that, depending upon size, stability, and solubility of the compounds injected, molecules delivered intrathecally could hit targets throughout the entire CNS.

[0670] In some embodiments, the intrathecal administration is via a pump. The pump may be a surgically implanted osmotic pump. In one embodiment, the osmotic pump is implanted into the subarachnoid space of the spinal canal to facilitate intrathecal administration.

[0671] In some embodiments, the intrathecal administration is via an intrathecal delivery system for a pharmaceutical including a reservoir containing a volume of the pharmaceutical agent, and a pump configured to deliver a portion of the pharmaceutical agent contained in the reservoir. More details about this intrathecal delivery system may be found in WO 2015/116658, which is incorporated by reference in its entirety.

[0672] The amount of intrathecally injected RNAi agents may vary from one target gene to another target gene and the appropriate amount that has to be applied may have to be determined individually for each target gene. Typically, this amount ranges from 10 μg to 2 mg, optionally 50 g to 1500 μg, more optionally 100 μg to 1000 μg.

[0673] Vector-Encoded RNAi Agents of the Disclosure

[0674] RNAi agents targeting the SNCA gene can be expressed from transcription units inserted into DNA or RNA vectors (see, e.g., Couture, A, et al., TIG. (1996), 12: 5-10; WO 00/22113, WO 00/22114, and U.S. Pat. No. 6,054,299). Expression is optionally sustained (months or longer), depending upon the specific construct used and the target tissue or cell type. These transgenes can be introduced as a linear construct, a circular plasmid, or a viral vector, which can be an integrating or non-integrating vector. The transgene can also be constructed to permit it to be inherited as an extrachromosomal plasmid (Gassmann, et al., (1995) Proc. Natl. Acad. Sci. USA 92: 1292).

[0675] The individual strand or strands of an RNAi agent can be transcribed from a promoter on an expression vector. Where two separate strands are to be expressed to generate, for example, a dsRNA, two separate expression vectors can be co-introduced (e.g., by transfection or infection) into a target cell. Alternatively, each individual strand of a dsRNA can be transcribed by promoters both of which are located on the same expression plasmid. In one embodiment, a dsRNA is expressed as inverted repeat polynucleotides joined by a linker polynucleotide sequence such that the dsRNA has a stem and loop structure.

[0676] RNAi agent expression vectors are generally DNA plasmids or viral vectors. Expression vectors compatible with eukaryotic cells, optionally those compatible with vertebrate cells, can be used to produce recombinant constructs for the expression of an RNAi agent as described herein. Delivery of RNAi agent expressing vectors can be systemic, such as by intravenous or intramuscular administration, by administration to target cells ex-planted from the patient followed by reintroduction into the patient, or by any other means that allows for introduction into a desired target cell.

[0677] Viral vector systems which can be utilized with the methods and compositions described herein include, but are not limited to, (a) adenovirus vectors; (b) retrovirus vectors, including but not limited to lentiviral vectors, moloney murine leukemia virus, etc.; (c) adeno-associated virus (AAV) vectors; (d) herpes simplex virus vectors; (e) SV 40 vectors; (f) polyoma virus vectors; (g) papilloma virus vectors; (h) picornavirus vectors; (i) pox virus vectors such as an orthopox, e.g., vaccinia virus vectors or avipox, e.g. canary pox or fowl pox; and (j) a helper-dependent or gutless adenovirus. Replication-defective viruses can also be advantageous. Different vectors will or will not become incorporated into the cells' genome. The constructs can include viral sequences for transfection, if desired. Alternatively, the construct can be incorporated into vectors capable of episomal replication, e.g. EPV and EBV vectors. Constructs for the recombinant expression of an RNAi agent will generally require regulatory elements, e.g., promoters, enhancers, etc., to ensure the expression of the RNAi agent in target cells. Other aspects to consider for vectors and constructs are known in the art.

[0678] VI. Pharmaceutical Compositions of the Invention

[0679] The present disclosure also includes pharmaceutical compositions and formulations which include the RNAi agents of the disclosure. In one embodiment, provided herein are pharmaceutical compositions containing an RNAi agent, as described herein, and a pharmaceutically acceptable carrier. The pharmaceutical compositions containing the RNAi agent are useful for treating a disease or disorder associated with the expression or activity of SNCA, e.g., a SNCA-associated neurodegenerative disease, such as a synucleinopathy, such as PD, multiple system atrophy, Lewy body dementia (LBD), pure autonomic failure (PAF), Pick's disease, progressive supranuclear palsy, dementia pugilistica, parkinsonism linked to chromosome 17, Lytico-Bodig disease, tangle predominant dementia, Argyrophilic grain disease, ganglioglioma, gangliocytoma, meningioangiomatosis, subacute sclerosing panencephalitis, lead encephalopathy, tuberous sclerosis, Hallervorden-Spatz disease, lipofuscinosis, corticobasal degeneration, frontotemporal dementia, frontotemporal lobar degeneration, Alzheimer's disease, Huntington's disease, Down's syndrome, psychosis, schizophrenia and Creutzfeldt-Jakob disease.

[0680] Such pharmaceutical compositions are formulated based on the mode of delivery. One example is compositions that are formulated for systemic administration via parenteral delivery, e.g., by intravenous (IV), intramuscular (IM), or for subcutaneous (subQ) delivery. Another example is compositions that are formulated for direct delivery into the CNS, e.g., by intrathecal or intravitreal routes of injection, optionally by infusion into the brain (e.g., striatum), such as by continuous pump infusion.

[0681] In some embodiments, the pharmaceutical compositions of the disclosure are pyrogen free or non-pyrogenic.

[0682] The pharmaceutical compositions of the disclosure may be administered in dosages sufficient to inhibit expression of a SNCA gene. In general, a suitable dose of an RNAi agent of the disclosure will be in the range of about 0.001 to about 200.0 milligrams per kilogram body weight of the recipient per day, generally in the range of about 1 to 50 mg per kilogram body weight per day.

[0683] A repeat-dose regimen may include administration of a therapeutic amount of an RNAi agent on a regular basis, such as monthly to once every six months. In certain embodiments, the RNAi agent is administered about once per quarter (i.e., about once every three months) to about twice per year.

[0684] After an initial treatment regimen (e.g., loading dose), the treatments can be administered on a less frequent basis.

[0685] In other embodiments, a single dose of the pharmaceutical compositions can be long lasting, such that subsequent doses are administered at not more than 1, 2, 3, or 4 or more month intervals. In some embodiments of the disclosure, a single dose of the pharmaceutical compositions of the disclosure is administered once per month. In other embodiments of the disclosure, a single dose of the pharmaceutical compositions of the disclosure is administered once per quarter to twice per year.

[0686] The skilled artisan will appreciate that certain factors can influence the dosage and timing required to effectively treat a subject, including but not limited to the severity of the disease or disorder, previous treatments, the general health or age of the subject, and other diseases present. Moreover, treatment of a subject with a therapeutically effective amount of a composition can include a single treatment or a series of treatments.

[0687] Advances in mouse genetics have generated mouse models for the study of SNCA-associated diseases that would benefit from reduction in the expression of SNCA. Such models can be used for in vivo testing of RNAi agents, as well as for determining a therapeutically effective dose. Suitable mouse models are known in the art and include, for example, the mouse models described elsewhere herein.

[0688] The pharmaceutical compositions of the present disclosure can be administered in a number of ways depending upon whether local or systemic treatment is desired and upon the area to be treated. Administration can be topical (e.g., by a transdermal patch), pulmonary, e.g., by inhalation or insufflation of powders or aerosols, including by nebulizer; intratracheal, intranasal, epidermal and transdermal, oral or parenteral. Parenteral administration includes intravenous, intraarterial, subcutaneous, intraperitoneal or intramuscular injection or infusion; subdermal, e.g., via an implanted device; or intracranial, e.g., by intraparenchymal, intrathecal or intraventricular, administration.

[0689] The RNAi agents can be delivered in a manner to target a particular tissue, such as the liver, the CNS (e.g., neuronal, glial or vascular tissue of the brain), or both the liver and CNS.

[0690] Pharmaceutical compositions and formulations for topical administration can include transdermal patches, ointments, lotions, creams, gels, drops, suppositories, sprays, liquids and powders. Conventional pharmaceutical carriers, aqueous, powder or oily bases, thickeners and the like can be necessary or desirable. Coated condoms, gloves and the like can also be useful. Suitable topical formulations include those in which the RNAi agents featured in the disclosure are in admixture with a topical delivery agent such as lipids, liposomes, fatty acids, fatty acid esters, steroids, chelating agents and surfactants. Suitable lipids and liposomes include neutral (e.g., dioleoylphosphatidyl DOPE ethanolamine, dimyristoylphosphatidyl choline DMPC, distearolyphosphatidyl choline) negative (e.g., dimyristoylphosphatidyl glycerol DMPG) and cationic (e.g., dioleoyltetramethylaminopropyl DOTAP and dioleoylphosphatidyl ethanolamine DOTMA). RNAi agents featured in the disclosure can be encapsulated within liposomes or can form complexes thereto, in particular to cationic liposomes. Alternatively, RNAi agents can be complexed to lipids, in particular to cationic lipids. Suitable fatty acids and esters include but are not limited to arachidonic acid, oleic acid, eicosanoic acid, lauric acid, caprylic acid, capric acid, myristic acid, palmitic acid, stearic acid, linoleic acid, linolenic acid, dicaprate, tricaprate, monoolein, dilaurin, glyceryl 1-monocaprate, 1-dodecylazacycloheptan-2-one, an acylcarnitine, an acylcholine, or a C₁₋₂₀ alkyl ester (e.g., isopropylmyristate IPM), monoglyceride, diglyceride or pharmaceutically acceptable salt thereof. Topical formulations are described in detail in U.S. Pat. No. 6,747,014, which is incorporated herein by reference.

[0691] A. RNAi Agent Formulations Comprising Membranous Molecular Assemblies

[0692] An RNAi agent for use in the compositions and methods of the disclosure can be formulated for delivery in a membranous molecular assembly, e.g., a liposome or a micelle. As used herein, the term “liposome” refers to a vesicle composed of amphiphilic lipids arranged in at least one bilayer, e.g., one bilayer or a plurality of bilayers. Liposomes include unilamellar and multilamellar vesicles that have a membrane formed from a lipophilic material and an aqueous interior. The aqueous portion contains the RNAi agent composition. The lipophilic material isolates the aqueous interior from an aqueous exterior, which typically does not include the RNAi agent composition, although in some examples, it may. Liposomes are useful for the transfer and delivery of active ingredients to the site of action. Because the liposomal membrane is structurally similar to biological membranes, when liposomes are applied to a tissue, the liposomal bilayer fuses with bilayer of the cellular membranes. As the merging of the liposome and cell progresses, the internal aqueous contents that include the RNAi agent are delivered into the cell where the RNAi agent can specifically bind to a target RNA and can mediate RNAi. In some cases, the liposomes are also specifically targeted, e.g., to direct the RNAi agent to particular cell types.

[0693] A liposome containing an RNAi agent can be prepared by a variety of methods. In one example, the lipid component of a liposome is dissolved in a detergent so that micelles are formed with the lipid component. For example, the lipid component can be an amphipathic cationic lipid or lipid conjugate. The detergent can have a high critical micelle concentration and may be nonionic. Exemplary detergents include cholate, CHAPS, octylglucoside, deoxycholate, and lauroyl sarcosine. The RNAi agent preparation is then added to the micelles that include the lipid component. The cationic groups on the lipid interact with the RNAi agent and condense around the RNAi agent to form a liposome. After condensation, the detergent is removed, e.g., by dialysis, to yield a liposomal preparation of RNAi agent.

[0694] If necessary, a carrier compound that assists in condensation can be added during the condensation reaction, e.g., by controlled addition. For example, the carrier compound can be a polymer other than a nucleic acid (e.g., spermine or spermidine). pH can also be adjusted to favor condensation.

[0695] Methods for producing stable polynucleotide delivery vehicles, which incorporate a polynucleotide/cationic lipid complex as structural components of the delivery vehicle, are further described in, e.g., WO 96/37194, the entire contents of which are incorporated herein by reference. Liposome formation can also include one or more aspects of exemplary methods described in Felgner, P. L. et al., (1987) Proc. Natl. Acad. Sci. USA 8: 7413-7417; U.S. Pat. Nos. 4,897,355; 5,171,678; Bangham et al., (1965) M Mol. Biol. 23: 238; Olson et al., (1979) Biochim. Biophys. Acta 557: 9; Szoka et al., (1978) Proc. Natl. Acad. Sci. 75: 4194; Mayhew et al., (1984) Biochim. Biophys. Acta 775: 169; Kim et al., (1983) Biochim. Biophys. Acta 728: 339; and Fukunaga et al., (1984) Endocrinol. 115: 757. Commonly used techniques for preparing lipid aggregates of appropriate size for use as delivery vehicles include sonication and freeze-thaw plus extrusion (see, e.g., Mayer et al., (1986) Biochim. Biophys. Acta 858: 161. Microfluidization can be used when consistently small (50 to 200 nm) and relatively uniform aggregates are desired (Mayhew et al., (1984) Biochim. Biophys. Acta 775: 169. These methods are readily adapted to packaging RNAi agent preparations into liposomes.

[0696] Liposomes fall into two broad classes. Cationic liposomes are positively charged liposomes which interact with the negatively charged nucleic acid molecules to form a stable complex. The positively charged nucleic acid/liposome complex binds to the negatively charged cell surface and is internalized in an endosome. Due to the acidic pH within the endosome, the liposomes are ruptured, releasing their contents into the cell cytoplasm (Wang et al. (1987) Biochem. Biophys. Res. Commun., 147: 980-985).

[0697] Liposomes, which are pH-sensitive or negatively charged, entrap nucleic acids rather than complex with them. Since both the nucleic acid and the lipid are similarly charged, repulsion rather than complex formation occurs. Nevertheless, some nucleic acid is entrapped within the aqueous interior of these liposomes. pH sensitive liposomes have been used to deliver nucleic acids encoding the thymidine kinase gene to cell monolayers in culture. Expression of the exogenous gene was detected in the target cells (Zhou et al. (1992) Journal of Controlled Release, 19: 269-274).

[0698] One major type of liposomal composition includes phospholipids other than naturally-derived phosphatidylcholine. Neutral liposome compositions, for example, can be formed from dimyristoyl phosphatidylcholine (DMPC) or dipalmitoyl phosphatidylcholine (DPPC). Anionic liposome compositions generally are formed from dimyristoyl phosphatidylglycerol, while anionic fusogenic liposomes are formed primarily from dioleoyl phosphatidylethanolamine (DOPE). Another type of liposomal composition is formed from phosphatidylcholine (PC) such as, for example, soybean PC, and egg PC. Another type is formed from mixtures of phospholipid or phosphatidylcholine or cholesterol.

[0699] Examples of other methods to introduce liposomes into cells in vitro and in vivo include U.S. Pat. Nos. 5,283,185; 5,171,678; WO 94/00569; WO 93/24640; WO 91/16024; Felgner, (1994) J. Biol. Chem. 269: 2550; Nabel, (1993) Proc. Natl. Acad. Sci. 90: 11307; Nabel, (1992) Human Gene Ther. 3: 649; Gershon, (1993) Biochem. 32: 7143; and Strauss, (1992) EMBO J. 11: 417.

[0700] Non-ionic liposomal systems have also been examined to determine their utility in the delivery of drugs to the skin, in particular systems comprising non-ionic surfactant and cholesterol.

[0701] Non-ionic liposomal formulations comprising Novasome™ I (glyceryl dilaurate/cholesterol/polyoxyethylene-10-stearyl ether) and Novasome™ II (glyceryl distearate/cholesterol/polyoxyethylene-10-stearyl ether) were used to deliver cyclosporin-A into the dermis of mouse skin. Results indicated that such non-ionic liposomal systems were effective in facilitating the deposition of cyclosporine A into different layers of the skin (Hu et al., (1994) S.T.P.Pharma. Sci., 4(6): 466).

[0702] Liposomes also include “sterically stabilized” liposomes, a term which, as used herein, refers to liposomes comprising one or more specialized lipids that, when incorporated into liposomes, result in enhanced circulation lifetimes relative to liposomes lacking such specialized lipids. Examples of sterically stabilized liposomes are those in which part of the vesicle-forming lipid portion of the liposome (A) comprises one or more glycolipids, such as monosialoganglioside G_{M1}, or (B) is derivatized with one or more hydrophilic polymers, such as a polyethylene glycol (PEG) moiety. While not wishing to be bound by any particular theory, it is thought in the art that, at least for sterically stabilized liposomes containing gangliosides, sphingomyelin, or PEG-derivatized lipids, the enhanced circulation half-life of these sterically stabilized liposomes derives from a reduced uptake into cells of the reticuloendothelial system (RES) (Allen et al., (1987) FEBS Letters, 223: 42; Wu et al., (1993) Cancer Research, 53: 3765).

[0703] Various liposomes comprising one or more glycolipids are known in the art. Papahadjopoulos et al. (Ann. N.Y. Acad. Sci., (1987), 507: 64) reported the ability of monosialoganglioside G_{M1}, galactocerebroside sulfate and phosphatidylinositol to improve blood half-lives of liposomes. These findings were expounded upon by Gabizon et al. (Proc. Natl. Acad. Sci. U.S.A., (1988), 85: 6949). U.S. Pat. No. 4,837,028 and WO 88/04924, both to Allen et al., disclose liposomes comprising (1) sphingomyelin and (2) the ganglioside G_{M1} or a galactocerebroside sulfate ester. U.S. Pat. No. 5,543,152 (Webb et al.) discloses liposomes comprising sphingomyelin. Liposomes comprising 1,2-sn-dimyristoylphosphatidylcholine are disclosed in WO 97/13499 (Lim et al).

[0704] In one embodiment, cationic liposomes are used. Cationic liposomes possess the advantage of being able to fuse to the cell membrane. Non-cationic liposomes, although not able to fuse as efficiently with the plasma membrane, are taken up by macrophages in vivo and can be used to deliver RNAi agents to macrophages.

[0705] Further advantages of liposomes include: liposomes obtained from natural phospholipids are biocompatible and biodegradable; liposomes can incorporate a wide range of water and lipid soluble drugs; liposomes can protect encapsulated RNAi agents in their internal compartments from metabolism and degradation (Rosoff, in “Pharmaceutical Dosage Forms,” Lieberman, Rieger and Banker (Eds.), 1988, volume 1, p. 245). Important considerations in the preparation of liposome formulations are the lipid surface charge, vesicle size and the aqueous volume of the liposomes.

[0706] A positively charged synthetic cationic lipid, N-[1-(2,3-dioleyloxy)propyl]-N,N,N-trimethylammonium chloride (DOTMA) can be used to form small liposomes that interact spontaneously with nucleic acid to form lipid-nucleic acid complexes which are capable of fusing with the negatively charged lipids of the cell membranes of tissue culture cells, resulting in delivery of RNAi agent (see, e.g., Felgner, P. L. et al., (1987) Proc. Natl. Acad. Sci. USA 8: 7413-7417, and U.S. Pat. No. 4,897,355 for a description of DOTMA and its use with DNA).

[0707] A DOTMA analogue, 1,2-bis(oleoyloxy)-3-(trimethylammonia)propane (DOTAP) can be used in combination with a phospholipid to form DNA-complexing vesicles. Lipofectin™ Bethesda Research Laboratories, Gaithersburg, Md.) is an effective agent for the delivery of highly anionic nucleic acids into living tissue culture cells that comprise positively charged DOTMA liposomes which interact spontaneously with negatively charged polynucleotides to form complexes. When enough positively charged liposomes are used, the net charge on the resulting complexes is also positive. Positively charged complexes prepared in this way spontaneously attach to negatively charged cell surfaces, fuse with the plasma membrane, and efficiently deliver functional nucleic acids into, for example, tissue culture cells. Another commercially available cationic lipid, 1,2-bis(oleoyloxy)-3,3-(trimethylammonia)propane (“DOTAP”) (Boehringer Mannheim, Indianapolis, Indiana) differs from DOTMA in that the oleoyl moieties are linked by ester, rather than ether linkages.

[0708] Other reported cationic lipid compounds include those that have been conjugated to a variety of moieties including, for example, carboxyspermine which has been conjugated to one of two types of lipids and includes compounds such as 5-carboxyspermylglycine dioctaoleoylamide (“DOGS”) (Transfectam™, Promega, Madison, Wisconsin) and dipalmitoylphosphatidylethanolamine 5-carboxyspermyl-amide (“DPPES”) (see, e.g., U.S. Pat. No. 5,171,678).

[0709] Another cationic lipid conjugate includes derivatization of the lipid with cholesterol (“DC-Chol”) which has been formulated into liposomes in combination with DOPE (See, Gao, X. and Huang, L., (1991) Biochim. Biophys. Res. Commun. 179: 280). Lipopolylysine, made by conjugating polylysine to DOPE, has been reported to be effective for transfection in the presence of serum (Zhou, X. et al., (1991) Biochim. Biophys. Acta 1065: 8). For certain cell lines, these liposomes containing conjugated cationic lipids, are said to exhibit lower toxicity and provide more efficient transfection than the DOTMA-containing compositions. Other commercially available cationic lipid products include DMRIE and DMRIE-HP (Vical, La Jolla, California) and Lipofectamine (DOSPA) (Life Technology, Inc., Gaithersburg, Maryland). Other cationic lipids suitable for the delivery of oligonucleotides are described in WO 98/39359 and WO 96/37194.

[0710] Liposomal formulations are particularly suited for topical administration, liposomes present several advantages over other formulations. Such advantages include reduced side effects related to high systemic absorption of the administered drug, increased accumulation of the administered drug at the desired target, and the ability to administer RNAi agent into the skin. In some implementations, liposomes are used for delivering RNAi agent to epidermal cells and also to enhance the penetration of RNAi agent into dermal tissues, e.g., into skin. For example, the liposomes can be applied topically. Topical delivery of drugs formulated as liposomes to the skin has been documented (see, e.g., Weiner et al., (1992) Journal of Drug Targeting, vol. 2,405-410 and du Plessis et al., (1992) Antiviral Research, 18: 259-265; Mannino, R. J. and Fould-Fogerite, S., (1998) Biotechniques 6: 682-690; Itani, T. et al., (1987) Gene 56: 267-276; Nicolau, C. et al. (1987) Meth. Enzymol. 149: 157-176; Straubinger, R. M. and Papahadjopoulos, D. (1983) Meth. Enzymol. 101: 512-527; Wang, C. Y. and Huang, L., (1987) Proc. Natl. Acad. Sci. USA 84: 7851-7855).

[0711] Non-ionic liposomal systems have also been examined to determine their utility in the delivery of drugs to the skin, in particular systems comprising non-ionic surfactant and cholesterol. Non-ionic liposomal formulations comprising Novasome I (glyceryl dilaurate/cholesterol/polyoxyethylene-10-stearyl ether) and Novasome II (glyceryl distearate/cholesterol/polyoxyethylene-10-stearyl ether) were used to deliver a drug into the dermis of mouse skin. Such formulations with RNAi agent are useful for treating a dermatological disorder.

[0712] Liposomes that include RNAi agents can be made highly deformable. Such deformability can enable the liposomes to penetrate through pore that are smaller than the average radius of the liposome. For example, transfersomes (highly deformable lipid aggregates which are attractive candidates for drug delivery vehicles) are a type of deformable liposomes. Transfersomes can be described as lipid droplets which are so highly deformable that they are easily able to penetrate through pores which are smaller than the droplet. Transfersomes are adaptable to the environment in which they are used, e.g., they are self-optimizing (adaptive to the shape of pores in the skin), self-repairing, frequently reach their targets without fragmenting, and often self-loading. Transferosomes can be made by adding surface edge activators, usually surfactants, to a standard liposomal composition. Transfersomes have been used to deliver serum albumin to the skin. The transfersome-mediated delivery of serum albumin has been shown to be as effective as subcutaneous injection of a solution containing serum albumin. Transfersomes that include RNAi agent can be delivered, for example, subcutaneously by infection in order to deliver RNAi agent to keratinocytes in the skin. In order to cross intact mammalian skin, lipid vesicles must pass through a series of fine pores, each with a diameter less than 50 nm, under the influence of a suitable transdermal gradient. In addition, due to the lipid properties, these transferosomes can be self-optimizing (adaptive to the shape of pores, e.g., in the skin), self-repairing, and can frequently reach their targets without fragmenting, and often self-loading.

[0713] Other formulations amenable to the present disclosure are described in U.S. provisional application Ser. No. 61/018,616, filed Jan. 2, 2008; 61/018,611, filed Jan. 2, 2008; 61/039,748, filed Mar. 26, 2008; 61/047,087, filed Apr. 22, 2008 and 61/051,528, filed May 8, 2008. PCT application number PCT/US2007/080331, filed Oct. 3, 2007, also describes formulations that are amenable to the present disclosure.

[0714] Surfactants find wide application in formulations such as those described herein, particularly in emulsions (including microemulsions) and liposomes. The most common way of classifying and ranking the properties of the many different types of surfactants, both natural and synthetic, is by the use of the hydrophile/lipophile balance (HLB). The nature of the hydrophilic group (also known as the “head”) provides the most useful means for categorizing the different surfactants used in formulations (Rieger, in Pharmaceutical Dosage Forms, Marcel Dekker, Inc., New York, N.Y., 1988, p. 285).

[0715] If the surfactant molecule is not ionized, it is classified as a nonionic surfactant. Nonionic surfactants find wide application in pharmaceutical and cosmetic products and are usable over a wide range of pH values. In general, their HLB values range from 2 to about 18 depending on their structure. Nonionic surfactants include nonionic esters such as ethylene glycol esters, propylene glycol esters, glyceryl esters, polyglyceryl esters, sorbitan esters, sucrose esters, and ethoxylated esters. Nonionic alkanolamides and ethers such as fatty alcohol ethoxylates, propoxylated alcohols, and ethoxylated/propoxylated block polymers are also included in this class. The polyoxyethylene surfactants are the most popular members of the nonionic surfactant class.

[0716] If the surfactant molecule carries a negative charge when it is dissolved or dispersed in water, the surfactant is classified as anionic. Anionic surfactants include carboxylates such as soaps, acyl lactylates, acyl amides of amino acids, esters of sulfuric acid such as alkyl sulfates and ethoxylated alkyl sulfates, sulfonates such as alkyl benzene sulfonates, acyl isethionates, acyl taurates and sulfosuccinates, and phosphates. The most important members of the anionic surfactant class are the alkyl sulfates and the soaps.

[0717] If the surfactant molecule carries a positive charge when it is dissolved or dispersed in water, the surfactant is classified as cationic. Cationic surfactants include quaternary ammonium salts and ethoxylated amines. The quaternary ammonium salts are the most used members of this class.

[0718] If the surfactant molecule has the ability to carry either a positive or negative charge, the surfactant is classified as amphoteric. Amphoteric surfactants include acrylic acid derivatives, substituted alkylamides, N-alkylbetaines and phosphatides.

[0719] The use of surfactants in drug products, formulations and in emulsions has been reviewed (Rieger, in Pharmaceutical Dosage Forms, Marcel Dekker, Inc., New York, N.Y., 1988, p. 285).

[0720] The RNAi agent for use in the methods of the disclosure can also be provided as micellar formulations. “Micelles” are defined herein as a particular type of molecular assembly in which amphipathic molecules are arranged in a spherical structure such that all the hydrophobic portions of the molecules are directed inward, leaving the hydrophilic portions in contact with the surrounding aqueous phase. The converse arrangement exists if the environment is hydrophobic.

[0721] A mixed micellar formulation suitable for delivery through transdermal membranes may be prepared by mixing an aqueous solution of the siRNA composition, an alkali metal C₈ to C22 alkyl sulphate, and a micelle forming compounds. Exemplary micelle forming compounds include lecithin, hyaluronic acid, pharmaceutically acceptable salts of hyaluronic acid, glycolic acid, lactic acid, chamomile extract, cucumber extract, oleic acid, linoleic acid, linolenic acid, monoolein, monooleates, monolaurates, borage oil, evening of primrose oil, menthol, trihydroxy oxo cholanyl glycine and pharmaceutically acceptable salts thereof, glycerin, polyglycerin, lysine, polylysine, triolein, polyoxyethylene ethers and analogues thereof, polidocanol alkyl ethers and analogues thereof, chenodeoxycholate, deoxycholate, and mixtures thereof. The micelle forming compounds may be added at the same time or after addition of the alkali metal alkyl sulphate. Mixed micelles will form with substantially any kind of mixing of the ingredients but vigorous mixing in order to provide smaller size micelles.

[0722] In one method a first micellar composition is prepared which contains the siRNA composition and at least the alkali metal alkyl sulphate. The first micellar composition is then mixed with at least three micelle forming compounds to form a mixed micellar composition. In another method, the micellar composition is prepared by mixing the siRNA composition, the alkali metal alkyl sulphate and at least one of the micelle forming compounds, followed by addition of the remaining micelle forming compounds, with vigorous mixing.

[0723] Phenol or m-cresol may be added to the mixed micellar composition to stabilize the formulation and protect against bacterial growth. Alternatively, phenol or m-cresol may be added with the micelle forming ingredients. An isotonic agent such as glycerin may also be added after formation of the mixed micellar composition.

[0724] For delivery of the micellar formulation as a spray, the formulation can be put into an aerosol dispenser and the dispenser is charged with a propellant. The propellant, which is under pressure, is in liquid form in the dispenser. The ratios of the ingredients are adjusted so that the aqueous and propellant phases become one, i.e., there is one phase. If there are two phases, it is necessary to shake the dispenser prior to dispensing a portion of the contents, e.g., through a metered valve. The dispensed dose of pharmaceutical agent is propelled from the metered valve in a fine spray.

[0725] Propellants may include hydrogen-containing chlorofluorocarbons, hydrogen-containing fluorocarbons, dimethyl ether and diethyl ether. In certain embodiments, IFA 134a (1,1,1,2 tetrafluoroethane) may be used.

[0726] The specific concentrations of the essential ingredients can be determined by relatively straightforward experimentation. For absorption through the oral cavities, it is often desirable to increase, e.g., at least double or triple, the dosage for through injection or administration through the gastrointestinal tract.

[0727] Lipid Particles

[0728] RNAi agents, e.g., dsRNAs of in the disclosure may be fully encapsulated in a lipid formulation, e.g., a LNP, or other nucleic acid-lipid particle.

[0729] As used herein, the term “LNP” refers to a stable nucleic acid-lipid particle. LNPs typically contain a cationic lipid, a non-cationic lipid, and a lipid that prevents aggregation of the particle (e.g., a PEG-lipid conjugate). LNPs are extremely useful for systemic applications, as they exhibit extended circulation lifetimes following intravenous (i.v.) injection and accumulate at distal sites (e.g., sites physically separated from the administration site). LNPs include “pSPLP,” which include an encapsulated condensing agent-nucleic acid complex as set forth in WO 00/03683. The particles of the present disclosure typically have a mean diameter of about 50 nm to about 150 nm, more typically about 60 nm to about 130 nm, more typically about 70 nm to about 110 nm, most typically about 70 nm to about 90 nm, and are substantially nontoxic. In addition, the nucleic acids when present in the nucleic acid-lipid particles of the present disclosure are resistant in aqueous solution to degradation with a nuclease. Nucleic acid-lipid particles and their method of preparation are disclosed in, e.g., U.S. Pat. Nos. 5,976,567; 5,981,501; 6,534,484; 6,586,410; 6,815,432; United States Patent publication No. 2010/0324120 and WO 96/40964.

[0730] In one embodiment, the lipid to drug ratio (mass/mass ratio) (e.g., lipid to dsRNA ratio) will be in the range of from about 1:1 to about 50:1, from about 1:1 to about 25:1, from about 3:1 to about 15:1, from about 4:1 to about 10:1, from about 5:1 to about 9:1, or about 6:1 to about 9:1. Ranges intermediate to the above recited ranges are also contemplated to be part of the disclosure.

[0731] Certain specific LNP formulations for delivery of RNAi agents have been described in the art, including, e.g., “LNP01” formulations as described in, e.g., WO 2008/042973, which is hereby incorporated by reference.

[0732] Additional exemplary lipid-dsRNA formulations are identified in the chart below.

| | | cationic lipid/non-cationic |
|---|---|---|
| | | lipid/cholesterol/PEG-lipid |
| | Ionizable/Cationic Lipid | conjugate Lipid:siRNA ratio |
| SNALP-1 | 1,2-Dilinolenyloxy-N,N- | DLinDMA/DPPC/Cholesterol/PEG- |
| | dimethylaminopropane (DLinDMA) | CDMA |
| | | (57.1/7.1/34.4/1.4) |
| | | lipid:siRNA ~7:1 |
| 2-XTC | 2,2-Dilinoleyl-4-dimethylaminoethyl-[1,3]- | XTC/DPPC/Cholesterol/PEG-cDMA |
| | dioxolane (XTC) | 57.1/7.1/34.4/1.4 |
| | | lipid:siRNA ~7:1 |
| LNP05 | 2,2-Dilinoleyl-4-dimethylaminoethyl-[1,3]- | XTC/DSPC/Cholesterol/PEG-DMG |
| | dioxolane (XTC) | 57.5/7.5/31.5/3.5 |
| | | lipid:siRNA ~6:1 |
| LNP06 | 2,2-Dilinoleyl-4-dimethylaminoethyl-[1,3]- | XTC/DSPC/Cholesterol/PEG-DMG |
| | dioxolane (XTC) | 57.5/7.5/31.5/3.5 |
| | | lipid:siRNA ~11:1 |
| LNP07 | 2,2-Dilinoleyl-4-dimethylaminoethyl-[1,3]- | XTC/DSPC/Cholesterol/PEG-DMG |
| | dioxolane (XTC) | 60/7.5/31/1.5, |
| | | lipid:siRNA ~6:1 |
| LNP08 | 2,2-Dilinoleyl-4-dimethylaminoethyl-[1,3]- | XTC/DSPC/Cholesterol/PEG-DMG |
| | dioxolane (XTC) | 60/7.5/31/1.5, |
| | | lipid:siRNA ~11:1 |
| LNP09 | 2,2-Dilinoleyl-4-dimethylaminoethyl-[1,3]- | XTC/DSPC/Cholesterol/PEG-DMG |
| | dioxolane (XTC) | 50/10/38.5/1.5 |
| | | Lipid:siRNA 10:1 |
| LNP10 | (3aR,5s,6aS)-N,N-dimethyl-2,2- | ALN100/DSPC/Cholesterol/PEG-DMG |
| | di((9Z,12Z)-octadeca-9,12- | 50/10/38.5/1.5 |
| | dienyl)tetrahydro-3aH- | Lipid:siRNA 10:1 |
| | cyclopenta[d][1,3]dioxol-5-amine | |
| | (ALN100) | |
| LNP11 | (6Z,9Z,28Z,31Z)-heptatriaconta-6,9,28,31- | MC-3/DSPC/Cholesterol/PEG-DMG |
| | tetraen-19-yl 4-(dimethylamino)butanoate | 50/10/38.5/1.5 |
| | (MC3) | Lipid:siRNA 10:1 |
| LNP12 | 1,1′-(2-(4-(2-((2-(bis(2- | Tech G1/DSPC/Cholesterol/PEG-DMG |
| | hydroxydodecyl)amino)ethyl)(2- | 50/10/38.5/1.5 |
| | hydroxydodecyl)amino)ethyl)piperazin-1- | Lipid:siRNA 10:1 |
| | yl)ethylazanediyl)didodecan-2-ol (Tech | |
| | G1) | |
| LNP13 | XTC | XTC/DSPC/Chol/PEG-DMG |
| | | 50/10/38.5/1.5 |
| | | Lipid:siRNA: 33:1 |
| LNP14 | MC3 | MC3/DSPC/Chol/PEG-DMG |
| | | 40/15/40/5 |
| | | Lipid:siRNA: 11:1 |
| LNP15 | MC3 | MC3/DSPC/Chol/PEG-DSG/GalNAc- |
| | | PEG-DSG |
| | | 50/10/35/4.5/0.5 |
| | | Lipid:siRNA: 11:1 |
| LNP16 | MC3 | MC3/DSPC/Chol/PEG-DMG |
| | | 50/10/38.5/1.5 |
| | | Lipid:siRNA: 7:1 |
| LNP17 | MC3 | MC3/DSPC/Chol/PEG-DSG |
| | | 50/10/38.5/1.5 |
| | | Lipid:siRNA: 10:1 |
| LNP18 | MC3 | MC3/DSPC/Chol/PEG-DMG |
| | | 50/10/38.5/1.5 |
| | | Lipid:siRNA: 12:1 |
| LNP19 | MC3 | MC3/DSPC/Chol/PEG-DMG |
| | | 50/10/35/5 |
| | | Lipid:siRNA: 8:1 |
| LNP20 | MC3 | MC3/DSPC/Chol/PEG-DPG |
| | | 50/10/38.5/1.5 |
| | | Lipid:siRNA: 10:1 |
| LNP21 | C12-200 | C12-200/DSPC/Chol/PEG-DSG |
| | | 50/10/38.5/1.5 |
| | | Lipid:siRNA: 7:1 |
| LNP22 | XTC | XTC/DSPC/Chol/PEG-DSG |
| | | 50/10/38.5/1.5 |
| | | Lipid:siRNA: 10:1 |

DSPC: distearoylphosphatidylcholine
DPPC: dipalmitoylphosphatidylcholine
PEG-DMG: PEG-didimyristoyl glycerol (C14-PEG, or PEG-C14) (PEG with avg mol wt of 2000)
PEG-DSG: PEG-distyryl glycerol (C18-PEG, or PEG-C18) (PEG with avg mol wt of 2000)
PEG-cDMA: PEG-carbamoyl-1,2-dimyristyloxypropylamine (PEG with avg mol wt of 2000)
SNALP (1,2-Dilinolenyloxy-N,N-dimethylaminopropane (DLinDMA)) comprising formulations are described in WO 2009/127060, which is hereby incorporated by reference.
XTC comprising formulations are described in WO 2010/088537, the entire contents of which are hereby incorporated herein by reference.
MC3 comprising formulations are described, e.g., in United States Patent Publication No. 2010/0324120, the entire contents of which are hereby incorporated by reference.
ALNY-100 comprising formulations are described in WO 2010/054406, the entire contents of which are hereby incorporated herein by reference.
C12-200 comprising formulations are described in WO 2010/129709, the entire contents of which are hereby incorporated herein by reference.

[0733] Compositions and formulations for oral administration include powders or granules, microparticulates, nanoparticulates, suspensions or solutions in water or non-aqueous media, capsules, gel capsules, sachets, tablets or minitablets. Thickeners, flavoring agents, diluents, emulsifiers, dispersing aids or binders can be desirable. In some embodiments, oral formulations are those in which dsRNAs featured in the disclosure are administered in conjunction with one or more penetration enhancer surfactants and chelators. Suitable surfactants include fatty acids or esters or salts thereof, bile acids or salts thereof. Suitable bile acids/salts include chenodeoxycholic acid (CDCA) and ursodeoxychenodeoxycholic acid (UDCA), cholic acid, dehydrocholic acid, deoxycholic acid, glucholic acid, glycholic acid, glycodeoxycholic acid, taurocholic acid, taurodeoxycholic acid, sodium tauro-24,25-dihydro-fusidate and sodium glycodihydrofusidate. Suitable fatty acids include arachidonic acid, undecanoic acid, oleic acid, lauric acid, caprylic acid, capric acid, myristic acid, palmitic acid, stearic acid, linoleic acid, linolenic acid, dicaprate, tricaprate, monoolein, dilaurin, glyceryl 1-monocaprate, 1-dodecylazacycloheptan-2-one, an acylcarnitine, an acylcholine, or a monoglyceride, a diglyceride or a pharmaceutically acceptable salt thereof (e.g., sodium). In some embodiments, combinations of penetration enhancers are used, for example, fatty acids/salts in combination with bile acids/salts. One exemplary combination is the sodium salt of lauric acid, capric acid and UDCA. Further penetration enhancers include polyoxyethylene-9-lauryl ether, polyoxyethylene-20-cetyl ether. DsRNAs featured in the disclosure can be delivered orally, in granular form including sprayed dried particles, or complexed to form micro or nanoparticles. DsRNA complexing agents include poly-amino acids; polyimines; polyacrylates; polyalkylacrylates, polyoxethanes, polyalkylcyanoacrylates; cationized gelatins, albumins, starches, acrylates, polyethyleneglycols (PEG) and starches; polyalkylcyanoacrylates; DEAE-derivatized polyimines, pollulans, celluloses and starches. Suitable complexing agents include chitosan, N-trimethylchitosan, poly-L-lysine, polyhistidine, polyornithine, polyspermines, protamine, polyvinylpyridine, polythiodiethylaminomethylethylene P(TDAE), polyaminostyrene (e.g., p-amino), poly(methylcyanoacrylate), poly(ethylcyanoacrylate), poly(butylcyanoacrylate), poly(isobutylcyanoacrylate), poly(isohexylcynaoacrylate), DEAE-methacrylate, DEAE-hexylacrylate, DEAE-acrylamide, DEAE-albumin and DEAE-dextran, polymethylacrylate, polyhexylacrylate, poly(D,L-lactic acid), poly(DL-lactic-co-glycolic acid (PLGA), alginate, and polyethyleneglycol (PEG). Oral formulations for dsRNAs and their preparation are described in detail in U.S. Pat. No. 6,887,906, U.S. 2003/0027780, and U.S. Pat. No. 6,747,014, each of which is incorporated herein by reference.

[0734] Compositions and formulations for parenteral, intraparenchymal (into the brain), intrathecal, intraventricular or intrahepatic administration can include sterile aqueous solutions which can also contain buffers, diluents and other suitable additives such as, but not limited to, penetration enhancers, carrier compounds and other pharmaceutically acceptable carriers or excipients.

[0735] Pharmaceutical compositions of the present disclosure include, but are not limited to, solutions, emulsions, and liposome-containing formulations. These compositions can be generated from a variety of components that include, but are not limited to, preformed liquids, self-emulsifying solids and self-emulsifying semisolids. Particularly preferred are formulations that target the brain when treating APP-associated diseases or disorders.

[0736] The pharmaceutical formulations of the present disclosure, which can conveniently be presented in unit dosage form, can be prepared according to conventional techniques well known in the pharmaceutical industry. Such techniques include the step of bringing into association the active ingredients with the pharmaceutical carrier(s) or excipient(s). In general, the formulations are prepared by uniformly and intimately bringing into association the active ingredients with liquid carriers or finely divided solid carriers or both, and then, if necessary, shaping the product.

[0737] The compositions of the present disclosure can be formulated into any of many possible dosage forms such as, but not limited to, tablets, capsules, gel capsules, liquid syrups, soft gels, suppositories, and enemas. The compositions of the present disclosure can also be formulated as suspensions in aqueous, non-aqueous or mixed media. Aqueous suspensions can further contain substances which increase the viscosity of the suspension including, for example, sodium carboxymethylcellulose, sorbitol or dextran. The suspension can also contain stabilizers.

[0738] Additional Formulations

[0739] i. Emulsions

[0740] The compositions of the present disclosure can be prepared and formulated as emulsions. Emulsions are typically heterogeneous systems of one liquid dispersed in another in the form of droplets usually exceeding 0.1p m in diameter (see e.g., Ansel's Pharmaceutical Dosage Forms and Drug Delivery Systems, Allen, LV., Popovich N G., and Ansel H C., 2004, Lippincott Williams & Wilkins (8th ed.), New York, NY; Idson, in Pharmaceutical Dosage Forms, Lieberman, Rieger and Banker (Eds.), 1988, Marcel Dekker, Inc., New York, N.Y., volume 1, p. 199; Rosoff, in Pharmaceutical Dosage Forms, Lieberman, Rieger and Banker (Eds.), 1988, Marcel Dekker, Inc., New York, N.Y., Volume 1, p. 245; Block in Pharmaceutical Dosage Forms, Lieberman, Rieger and Banker (Eds.), 1988, Marcel Dekker, Inc., New York, N.Y., volume 2, p. 335; Higuchi et al., in Remington's Pharmaceutical Sciences, Mack Publishing Co., Easton, Pa., 1985, p. 301). Emulsions are often biphasic systems comprising two immiscible liquid phases intimately mixed and dispersed with each other. In general, emulsions can be of either the water-in-oil (w/o) or the oil-in-water (o/w) variety. When an aqueous phase is finely divided into and dispersed as minute droplets into a bulk oily phase, the resulting composition is called a water-in-oil (w/o) emulsion. Alternatively, when an oily phase is finely divided into and dispersed as minute droplets into a bulk aqueous phase, the resulting composition is called an oil-in-water (o/w) emulsion. Emulsions can contain additional components in addition to the dispersed phases, and the active drug which can be present as a solution in either aqueous phase, oily phase or itself as a separate phase. Pharmaceutical excipients such as emulsifiers, stabilizers, dyes, and anti-oxidants can also be present in emulsions as needed. Pharmaceutical emulsions can also be multiple emulsions that are comprised of more than two phases such as, for example, in the case of oil-in-water-in-oil (o/w/o) and water-in-oil-in-water (w/o/w) emulsions. Such complex formulations often provide certain advantages that simple binary emulsions do not. Multiple emulsions in which individual oil droplets of an o/w emulsion enclose small water droplets constitute a w/o/w emulsion. Likewise, a system of oil droplets enclosed in globules of water stabilized in an oily continuous phase provides an o/w/o emulsion.

[0741] Emulsions are characterized by little or no thermodynamic stability. Often, the dispersed or discontinuous phase of the emulsion is well dispersed into the external or continuous phase and maintained in this form through the means of emulsifiers or the viscosity of the formulation. Either of the phases of the emulsion can be a semisolid or a solid, as is the case of emulsion-style ointment bases and creams. Other means of stabilizing emulsions entail the use of emulsifiers that can be incorporated into either phase of the emulsion. Emulsifiers can broadly be classified into four categories: synthetic surfactants, naturally occurring emulsifiers, absorption bases, and finely dispersed solids (see e.g., Ansel's Pharmaceutical Dosage Forms and Drug Delivery Systems, Allen, LV., Popovich N G., and Ansel H C., 2004, Lippincott Williams & Wilkins (8th ed.), New York, NY; Idson, in Pharmaceutical Dosage Forms, Lieberman, Rieger and Banker (Eds.), 1988, Marcel Dekker, Inc., New York, N.Y., volume 1, p. 199).

[0742] Synthetic surfactants, also known as surface active agents, have found wide applicability in the formulation of emulsions and have been reviewed in the literature (see e.g., Ansel's Pharmaceutical Dosage Forms and Drug Delivery Systems, Allen, LV., Popovich N G., and Ansel H C., 2004, Lippincott Williams & Wilkins (8th ed.), New York, NY; Rieger, in Pharmaceutical Dosage Forms, Lieberman, Rieger and Banker (Eds.), 1988, Marcel Dekker, Inc., New York, N.Y., volume 1, p. 285; Idson, in Pharmaceutical Dosage Forms, Lieberman, Rieger and Banker (Eds.), Marcel Dekker, Inc., New York, N.Y., 1988, volume 1, p. 199). Surfactants are typically amphiphilic and comprise a hydrophilic and a hydrophobic portion. The ratio of the hydrophilic to the hydrophobic nature of the surfactant has been termed the hydrophile/lipophile balance (HLB) and is a valuable tool in categorizing and selecting surfactants in the preparation of formulations. Surfactants can be classified into different classes based on the nature of the hydrophilic group: nonionic, anionic, cationic and amphoteric (see e.g., Ansel's Pharmaceutical Dosage Forms and Drug Delivery Systems, Allen, LV., Popovich N G., and Ansel H C., 2004, Lippincott Williams & Wilkins (8th ed.), New York, NY Rieger, in Pharmaceutical Dosage Forms, Lieberman, Rieger and Banker (Eds.), 1988, Marcel Dekker, Inc., New York, N.Y., volume 1, p. 285).

[0743] Naturally occurring emulsifiers used in emulsion formulations include lanolin, beeswax, phosphatides, lecithin and acacia. Absorption bases possess hydrophilic properties such that they can soak up water to form w/o emulsions yet retain their semisolid consistencies, such as anhydrous lanolin and hydrophilic petrolatum. Finely divided solids have also been used as good emulsifiers especially in combination with surfactants and in viscous preparations. These include polar inorganic solids, such as heavy metal hydroxides, nonswelling clays such as bentonite, attapulgite, hectorite, kaolin, montmorillonite, colloidal aluminum silicate and colloidal magnesium aluminum silicate, pigments and nonpolar solids such as carbon or glyceryl tristearate.

[0744] A large variety of non-emulsifying materials are also included in emulsion formulations and contribute to the properties of emulsions. These include fats, oils, waxes, fatty acids, fatty alcohols, fatty esters, humectants, hydrophilic colloids, preservatives and antioxidants (Block, in Pharmaceutical Dosage Forms, Lieberman, Rieger and Banker (Eds.), 1988, Marcel Dekker, Inc., New York, N.Y., volume 1, p. 335; Idson, in Pharmaceutical Dosage Forms, Lieberman, Rieger and Banker (Eds.), 1988, Marcel Dekker, Inc., New York, N.Y., volume 1, p. 199).

[0745] Hydrophilic colloids or hydrocolloids include naturally occurring gums and synthetic polymers such as polysaccharides (for example, acacia, agar, alginic acid, carrageenan, guar gum, karaya gum, and tragacanth), cellulose derivatives (for example, carboxymethylcellulose and carboxypropylcellulose), and synthetic polymers (for example, carbomers, cellulose ethers, and carboxyvinyl polymers). These disperse or swell in water to form colloidal solutions that stabilize emulsions by forming strong interfacial films around the dispersed-phase droplets and by increasing the viscosity of the external phase.

[0746] Since emulsions often contain a number of ingredients such as carbohydrates, proteins, sterols and phosphatides that can readily support the growth of microbes, these formulations often incorporate preservatives. Commonly used preservatives included in emulsion formulations include methyl paraben, propyl paraben, quaternary ammonium salts, benzalkonium chloride, esters of p-hydroxybenzoic acid, and boric acid. Antioxidants are also commonly added to emulsion formulations to prevent deterioration of the formulation. Antioxidants used can be free radical scavengers such as tocopherols, alkyl gallates, butylated hydroxyanisole, butylated hydroxytoluene, or reducing agents such as ascorbic acid and sodium metabisulfite, and antioxidant synergists such as citric acid, tartaric acid, and lecithin.

[0747] The application of emulsion formulations via dermatological, oral and parenteral routes and methods for their manufacture have been reviewed in the literature (see e.g., Ansel's Pharmaceutical Dosage Forms and Drug Delivery Systems, Allen, LV., Popovich N G., and Ansel H C., 2004, Lippincott Williams & Wilkins (8th ed.), New York, NY; Idson, in Pharmaceutical Dosage Forms, Lieberman, Rieger and Banker (Eds.), 1988, Marcel Dekker, Inc., New York, N.Y., volume 1, p. 199). Emulsion formulations for oral delivery have been very widely used because of ease of formulation, as well as efficacy from an absorption and bioavailability standpoint (see e.g., Ansel's Pharmaceutical Dosage Forms and Drug Delivery Systems, Allen, LV., Popovich N G., and Ansel H C., 2004, Lippincott Williams & Wilkins (8th ed.), New York, NY; Rosoff, in Pharmaceutical Dosage Forms, Lieberman, Rieger and Banker (Eds.), 1988, Marcel Dekker, Inc., New York, N.Y., volume 1, p. 245; Idson, in Pharmaceutical Dosage Forms, Lieberman, Rieger and Banker (Eds.), 1988, Marcel Dekker, Inc., New York, N.Y., volume 1, p. 199). Mineral-oil base laxatives, oil-soluble vitamins and high fat nutritive preparations are among the materials that have commonly been administered orally as o/w emulsions.

[0748] ii. Microemulsions

[0749] In one embodiment of the present disclosure, the compositions of RNAi agents and nucleic acids are formulated as microemulsions. A microemulsion can be defined as a system of water, oil and amphiphile which is a single optically isotropic and thermodynamically stable liquid solution (see e.g., Ansel's Pharmaceutical Dosage Forms and Drug Delivery Systems, Allen, LV., Popovich N G., and Ansel H C., 2004, Lippincott Williams & Wilkins (8th ed.), New York, NY; Rosoff, in Pharmaceutical Dosage Forms, Lieberman, Rieger and Banker (Eds.), 1988, Marcel Dekker, Inc., New York, N.Y., volume 1, p. 245). Typically, microemulsions are systems that are prepared by first dispersing an oil in an aqueous surfactant solution and then adding a sufficient amount of a fourth component, generally an intermediate chain-length alcohol to form a transparent system. Therefore, microemulsions have also been described as thermodynamically stable, isotropically clear dispersions of two immiscible liquids that are stabilized by interfacial films of surface-active molecules (Leung and Shah, in: Controlled Release of Drugs: Polymers and Aggregate Systems, Rosoff, M., Ed., 1989, VCH Publishers, New York, pages 185-215). Microemulsions commonly are prepared via a combination of three to five components that include oil, water, surfactant, cosurfactant and electrolyte. Whether the microemulsion is of the water-in-oil (w/o) or an oil-in-water (o/w) type is dependent on the properties of the oil and surfactant used, and on the structure and geometric packing of the polar heads and hydrocarbon tails of the surfactant molecules (Schott, in Remington's Pharmaceutical Sciences, Mack Publishing Co., Easton, Pa., 1985, p. 271).

[0750] The phenomenological approach utilizing phase diagrams has been extensively studied and has yielded a comprehensive knowledge, to one skilled in the art, of how to formulate microemulsions (see e.g., Ansel's Pharmaceutical Dosage Forms and Drug Delivery Systems, Allen, LV., Popovich N G., and Ansel H C., 2004, Lippincott Williams & Wilkins (8th ed.), New York, NY; Rosoff, in Pharmaceutical Dosage Forms, Lieberman, Rieger and Banker (Eds.), 1988, Marcel Dekker, Inc., New York, N.Y., volume 1, p. 245; Block, in Pharmaceutical Dosage Forms, Lieberman, Rieger and Banker (Eds.), 1988, Marcel Dekker, Inc., New York, N.Y., volume 1, p. 335). Compared to conventional emulsions, microemulsions offer the advantage of solubilizing water-insoluble drugs in a formulation of thermodynamically stable droplets that are formed spontaneously.

[0751] Surfactants used in the preparation of microemulsions include, but are not limited to, ionic surfactants, non-ionic surfactants, Brij 96, polyoxyethylene oleyl ethers, polyglycerol fatty acid esters, tetraglycerol monolaurate (ML310), tetraglycerol monooleate (M0310), hexaglycerol monooleate (P0310), hexaglycerol pentaoleate (P0500), decaglycerol monocaprate (MCA750), decaglycerol monooleate (M0750), decaglycerol sequioleate (S0750), decaglycerol decaoleate (DA0750), alone or in combination with cosurfactants. The cosurfactant, usually a short-chain alcohol such as ethanol, 1-propanol, and 1-butanol, serves to increase the interfacial fluidity by penetrating into the surfactant film and consequently creating a disordered film because of the void space generated among surfactant molecules. Microemulsions can, however, be prepared without the use of cosurfactants and alcohol-free self-emulsifying microemulsion systems are known in the art. The aqueous phase can typically be, but is not limited to, water, an aqueous solution of the drug, glycerol, PEG300, PEG400, polyglycerols, propylene glycols, and derivatives of ethylene glycol. The oil phase can include, but is not limited to, materials such as Captex 300, Captex 355, Capmul MCM, fatty acid esters, medium chain (C8-C12) mono, di, and tri-glycerides, polyoxyethylated glyceryl fatty acid esters, fatty alcohols, polyglycolized glycerides, saturated polyglycolized C8-C10 glycerides, vegetable oils and silicone oil.

[0752] Microemulsions are particularly of interest from the standpoint of drug solubilization and the enhanced absorption of drugs. Lipid based microemulsions (both o/w and w/o) have been proposed to enhance the oral bioavailability of drugs, including peptides (see e.g., U.S. Pat. Nos. 6,191,105; 7,063,860; 7,070,802; 7,157,099; Constantinides et al., Pharmaceutical Research, 1994, 11, 1385-1390; Ritschel, Meth. Find. Exp. Clin. Pharmacol., 1993, 13, 205). Microemulsions afford advantages of improved drug solubilization, protection of drug from enzymatic hydrolysis, possible enhancement of drug absorption due to surfactant-induced alterations in membrane fluidity and permeability, ease of preparation, ease of oral administration over solid dosage forms, improved clinical potency, and decreased toxicity (see e.g., U.S. Pat. Nos. 6,191,105; 7,063,860; 7,070,802; 7,157,099; Constantinides et al., Pharmaceutical Research, 1994, 11, 1385; Ho et al., J. Pharm. Sci., 1996, 85, 138-143). Often microemulsions can form spontaneously when their components are brought together at ambient temperature. This can be particularly advantageous when formulating thermolabile drugs, peptides or RNAi agents. Microemulsions have also been effective in the transdermal delivery of active components in both cosmetic and pharmaceutical applications. It is expected that the microemulsion compositions and formulations of the present disclosure will facilitate the increased systemic absorption of RNAi agents and nucleic acids from the gastrointestinal tract, as well as improve the local cellular uptake of RNAi agents and nucleic acids.

[0753] Microemulsions of the present disclosure can also contain additional components and additives such as sorbitan monostearate (Grill 3), Labrasol, and penetration enhancers to improve the properties of the formulation and to enhance the absorption of the RNAi agents and nucleic acids of the present disclosure. Penetration enhancers used in the microemulsions of the present disclosure can be classified as belonging to one of five broad categories—surfactants, fatty acids, bile salts, chelating agents, and non-chelating non-surfactants (Lee et al., Critical Reviews in Therapeutic Drug Carrier Systems, 1991, p. 92). Each of these classes has been discussed above.

[0754] iii. Microparticles

[0755] An RNAi agent of the disclosure may be incorporated into a particle, e.g., a microparticle. Microparticles can be produced by spray-drying, but may also be produced by other methods including lyophilization, evaporation, fluid bed drying, vacuum drying, or a combination of these techniques.

[0756] iv. Penetration Enhancers

[0757] In one embodiment, the present disclosure employs various penetration enhancers to effect the efficient delivery of nucleic acids, particularly RNAi agents, to the skin of animals. Most drugs are present in solution in both ionized and nonionized forms. However, usually only lipid soluble or lipophilic drugs readily cross cell membranes. It has been discovered that even non-lipophilic drugs can cross cell membranes if the membrane to be crossed is treated with a penetration enhancer. In addition to aiding the diffusion of non-lipophilic drugs across cell membranes, penetration enhancers also enhance the permeability of lipophilic drugs.

[0758] Penetration enhancers can be classified as belonging to one of five broad categories, i.e., surfactants, fatty acids, bile salts, chelating agents, and non-chelating non-surfactants (see e.g., Malmsten, M. Surfactants and polymers in drug delivery, Informa Health Care, New York, NY, 2002; Lee et al., Critical Reviews in Therapeutic Drug Carrier Systems, 1991, p. 92). Each of the above-mentioned classes of penetration enhancers are described below in greater detail.

[0759] Surfactants (or “surface-active agents”) are chemical entities which, when dissolved in an aqueous solution, reduce the surface tension of the solution or the interfacial tension between the aqueous solution and another liquid, with the result that absorption of RNAi agents through the mucosa is enhanced. In addition to bile salts and fatty acids, these penetration enhancers include, for example, sodium lauryl sulfate, polyoxyethylene-9-lauryl ether and polyoxyethylene-20-cetyl ether) (see e.g., Malmsten, M. Surfactants and polymers in drug delivery, Informa Health Care, New York, NY, 2002; Lee et al., Critical Reviews in Therapeutic Drug Carrier Systems, 1991, p. 92); and perfluorochemical emulsions, such as FC-43. Takahashi et al., J. Pharm. Pharmacol., 1988, 40, 252).

[0760] Various fatty acids and their derivatives which act as penetration enhancers include, for example, oleic acid, lauric acid, capric acid (n-decanoic acid), myristic acid, palmitic acid, stearic acid, linoleic acid, linolenic acid, dicaprate, tricaprate, monoolein (1-monooleoyl-rac-glycerol), dilaurin, caprylic acid, arachidonic acid, glycerol 1-monocaprate, 1-dodecylazacycloheptan-2-one, acylcarnitines, acylcholines, C₁₋₂ alkyl esters thereof (e.g., methyl, isopropyl and t-butyl), and mono- and di-glycerides thereof (i.e., oleate, laurate, caprate, myristate, palmitate, stearate, linoleate, etc.) (see e.g., Touitou, E., et al. Enhancement in Drug Delivery, CRC Press, Danvers, M A, 2006; Lee et al., Critical Reviews in Therapeutic Drug Carrier Systems, 1991, p.92; Muranishi, Critical Reviews in Therapeutic Drug Carrier Systems, 1990, 7, 1-33; El Hariri et al., J. Pharm. Pharmacol., 1992, 44, 651-654).

[0761] The physiological role of bile includes the facilitation of dispersion and absorption of lipids and fat-soluble vitamins (see e.g., Malmsten, M. Surfactants and polymers in drug delivery, Informa Health Care, New York, NY, 2002; Brunton, Chapter 38 in: Goodman & Gilman's The Pharmacological Basis of Therapeutics, 9th Ed., Hardman et al. Eds., McGraw-Hill, New York, 1996, pp. 934-935). Various natural bile salts, and their synthetic derivatives, act as penetration enhancers. Thus the term “bile salts” includes any of the naturally occurring components of bile as well as any of their synthetic derivatives. Suitable bile salts include, for example, cholic acid (or its pharmaceutically acceptable sodium salt, sodium cholate), dehydrocholic acid (sodium dehydrocholate), deoxycholic acid (sodium deoxycholate), glucholic acid (sodium glucholate), glycholic acid (sodium glycocholate), glycodeoxycholic acid (sodium glycodeoxycholate), taurocholic acid (sodium taurocholate), taurodeoxycholic acid (sodium taurodeoxycholate), chenodeoxycholic acid (sodium chenodeoxycholate), ursodeoxycholic acid (UDCA), sodium tauro-24,25-dihydro-fusidate (STDHF), sodium glycodihydrofusidate and polyoxyethylene-9-lauryl ether (POE) (see e.g., Malmsten, M. Surfactants and polymers in drug delivery, Informa Health Care, New York, NY, 2002; Lee et al., Critical Reviews in Therapeutic Drug Carrier Systems, 1991, page 92; Swinyard, Chapter 39 In: Remington's Pharmaceutical Sciences, 18th Ed., Gennaro, ed., Mack Publishing Co., Easton, Pa., 1990, pages 782-783; Muranishi, Critical Reviews in Therapeutic Drug Carrier Systems, 1990, 7, 1-33; Yamamoto et al., J. Pharm. Exp. Ther., 1992, 263, 25; Yamashita et al., J. Pharm. Sci., 1990, 79, 579-583).

[0762] Chelating agents, as used in connection with the present disclosure, can be defined as compounds that remove metallic ions from solution by forming complexes therewith, with the result that absorption of RNAi agents through the mucosa is enhanced. With regards to their use as penetration enhancers in the present disclosure, chelating agents have the added advantage of also serving as DNase inhibitors, as most characterized DNA nucleases require a divalent metal ion for catalysis and are thus inhibited by chelating agents (Jarrett, J. Chromatogr., 1993, 618, 315-339). Suitable chelating agents include but are not limited to disodium ethylenediaminetetraacetate (EDTA), citric acid, salicylates (e.g., sodium salicylate, 5-methoxysalicylate and homovanilate), N-acyl derivatives of collagen, laureth-9 and N-amino acyl derivatives of beta-diketones (enamines)(see e.g., Katdare, A. et al., Excipient development for pharmaceutical, biotechnology, and drug delivery, CRC Press, Danvers, M A, 2006; Lee et al., Critical Reviews in Therapeutic Drug Carrier Systems, 1991, page 92; Muranishi, Critical Reviews in Therapeutic Drug Carrier Systems, 1990, 7, 1-33; Buur et al., J. Control Rel., 1990, 14, 43-51).

[0763] As used herein, non-chelating non-surfactant penetration enhancing compounds can be defined as compounds that demonstrate insignificant activity as chelating agents or as surfactants but that nonetheless enhance absorption of RNAi agents through the alimentary mucosa (see e.g., Muranishi, Critical Reviews in Therapeutic Drug Carrier Systems, 1990, 7, 1-33). This class of penetration enhancers includes, for example, unsaturated cyclic ureas, 1-alkyl- and 1-alkenylazacyclo-alkanone derivatives (Lee et al., Critical Reviews in Therapeutic Drug Carrier Systems, 1991, page 92); and non-steroidal anti-inflammatory agents such as diclofenac sodium, indomethacin and phenylbutazone (Yamashita et al., J. Pharm. Pharmacol., 1987, 39, 621-626).

[0764] Agents that enhance uptake of RNAi agents at the cellular level can also be added to the pharmaceutical and other compositions of the present disclosure. For example, cationic lipids, such as lipofectin (Junichi et al, U.S. Pat. No. 5,705,188), cationic glycerol derivatives, and polycationic molecules, such as polylysine (WO 97/30731), are also known to enhance the cellular uptake of dsRNAs.

[0765] Other agents can be utilized to enhance the penetration of the administered nucleic acids, including glycols such as ethylene glycol and propylene glycol, pyrrols such as 2-pyrrol, azones, and terpenes such as limonene and menthone.

[0766] vi. Excipients

[0767] In contrast to a carrier compound, a “pharmaceutical carrier” or “excipient” is a pharmaceutically acceptable solvent, suspending agent or any other pharmacologically inert vehicle for delivering one or more nucleic acids to an animal. The excipient can be liquid or solid and is selected, with the planned manner of administration in mind, so as to provide for the desired bulk, consistency, etc., when combined with a nucleic acid and the other components of a given pharmaceutical composition. Typical pharmaceutical carriers include, but are not limited to, binding agents (e.g., pregelatinized maize starch, polyvinylpyrrolidone or hydroxypropyl methylcellulose, etc.); fillers (e.g., lactose and other sugars, microcrystalline cellulose, pectin, gelatin, calcium sulfate, ethyl cellulose, polyacrylates or calcium hydrogen phosphate, etc.); lubricants (e.g., magnesium stearate, talc, silica, colloidal silicon dioxide, stearic acid, metallic stearates, hydrogenated vegetable oils, corn starch, polyethylene glycols, sodium benzoate, sodium acetate, etc.); disintegrants (e.g., starch, sodium starch glycolate, etc.); and wetting agents (e.g., sodium lauryl sulphate, etc).

[0768] Pharmaceutically acceptable organic or inorganic excipients suitable for non-parenteral administration which do not deleteriously react with nucleic acids can also be used to formulate the compositions of the present disclosure. Suitable pharmaceutically acceptable carriers include, but are not limited to, water, salt solutions, alcohols, polyethylene glycols, gelatin, lactose, amylose, magnesium stearate, talc, silicic acid, viscous paraffin, hydroxymethylcellulose, polyvinylpyrrolidone and the like.

[0769] Formulations for topical administration of nucleic acids can include sterile and non-sterile aqueous solutions, non-aqueous solutions in common solvents such as alcohols, or solutions of the nucleic acids in liquid or solid oil bases. The solutions can also contain buffers, diluents and other suitable additives. Pharmaceutically acceptable organic or inorganic excipients suitable for non-parenteral administration which do not deleteriously react with nucleic acids can be used.

[0770] Suitable pharmaceutically acceptable excipients include, but are not limited to, water, salt solutions, alcohol, polyethylene glycols, gelatin, lactose, amylose, magnesium stearate, talc, silicic acid, viscous paraffin, hydroxymethylcellulose, polyvinylpyrrolidone and the like.

[0771] vii. Other Components

[0772] The compositions of the present disclosure can additionally contain other adjunct components conventionally found in pharmaceutical compositions, at their art-established usage levels. Thus, for example, the compositions can contain additional, compatible, pharmaceutically-active materials such as, for example, antipruritics, astringents, local anesthetics or anti-inflammatory agents, or can contain additional materials useful in physically formulating various dosage forms of the compositions of the present disclosure, such as dyes, flavoring agents, preservatives, antioxidants, opacifiers, thickening agents and stabilizers. However, such materials, when added, should not unduly interfere with the biological activities of the components of the compositions of the present disclosure. The formulations can be sterilized and, if desired, mixed with auxiliary agents, e.g., lubricants, preservatives, stabilizers, wetting agents, emulsifiers, salts for influencing osmotic pressure, buffers, colorings, flavorings or aromatic substances and the like which do not deleteriously interact with the nucleic acid(s) of the formulation.

[0773] Aqueous suspensions can contain substances which increase the viscosity of the suspension including, for example, sodium carboxymethylcellulose, sorbitol or dextran. The suspension can also contain stabilizers.

[0774] In some embodiments, pharmaceutical compositions featured in the disclosure include (a) one or more RNAi agents and (b) one or more agents which function by a non-RNAi mechanism and which are useful in treating a SNCA-associated neurodegenerative disorder. Examples of such agents include, but are not limited to dopamine agonists and promoters, among others, including carbidopa-levodopa, levodopa, entacopone, tolcapone, opicapone, pramipexole, ropinirole, apomorphine, rotigotine, selegiline, rasagiline, safinamide, amantadine, istradefylline, trihexyphenidyl, benztropine, rivastigmine, donepezil, galantamine and memantine.

[0775] Toxicity and therapeutic efficacy of such compounds can be determined by standard pharmaceutical procedures in cell cultures or experimental animals, e.g., for determining the LD₅₀ (the dose lethal to 50% of the population) and the ED₅₀ (the dose therapeutically effective in 50% of the population). The dose ratio between toxic and therapeutic effects is the therapeutic index and it can be expressed as the ratio LD₅₀/ED₅₀. Compounds that exhibit high therapeutic indices are preferred.

[0776] The data obtained from cell culture assays and animal studies can be used in formulating a range of dosage for use in humans. The dosage of compositions featured herein in the disclosure lies generally within a range of circulating concentrations that include the ED₅₀ with little or no toxicity. The dosage can vary within this range depending upon the dosage form employed and the route of administration utilized. For any compound used in the methods featured in the disclosure, the therapeutically effective dose can be estimated initially from cell culture assays. A dose can be formulated in animal models to achieve a circulating plasma concentration range of the compound or, when appropriate, of the polypeptide product of a target sequence (e.g., achieving a decreased concentration of the polypeptide) that includes the IC₅₀ (i.e., the concentration of the test compound which achieves a half-maximal inhibition of symptoms) as determined in cell culture. Such information can be used to more accurately determine useful doses in humans. Levels in plasma can be measured, for example, by high performance liquid chromatography.

[0777] In addition to their administration, as discussed above, the RNAi agents featured in the disclosure can be administered in combination with other known agents effective in treatment of pathological processes mediated by nucleotide repeat expression. In any event, the administering physician can adjust the amount and timing of RNAi agent administration on the basis of results observed using standard measures of efficacy known in the art or described herein.

[0778] VII. Kits

[0779] In certain aspects, the instant disclosure provides kits that include a suitable container containing a pharmaceutical formulation of a siRNA compound, e.g., a double-stranded siRNA compound, or siRNA compound, (e.g., a precursor, e.g., a larger siRNA compound which can be processed into a siRNA compound, or a DNA which encodes an siRNA compound, e.g., a double-stranded siRNA compound, or siRNA compound, or precursor thereof). In certain embodiments the individual components of the pharmaceutical formulation may be provided in one container. Alternatively, it may be desirable to provide the components of the pharmaceutical formulation separately in two or more containers, e.g., one container for a siRNA compound preparation, and at least another for a carrier compound. The kit may be packaged in a number of different configurations such as one or more containers in a single box. The different components can be combined, e.g., according to instructions provided with the kit. The components can be combined according to a method described herein, e.g., to prepare and administer a pharmaceutical composition. The kit can also include a delivery device.

[0780] VIII. Methods for Inhibiting SNCA Expression

[0781] The present disclosure also provides methods of inhibiting expression of a SNCA gene in a cell. The methods include contacting a cell with an RNAi agent, e.g., double stranded RNAi agent, in an amount effective to inhibit expression of SNCA in the cell, thereby inhibiting expression of SNCA in the cell. In certain embodiments of the disclosure, SNCA is inhibited preferentially in CNS (e.g., brain) cells. In other embodiments of the disclosure, SNCA is inhibited preferentially in the liver (e.g., hepatocytes). In certain embodiments of the disclosure, SNCA is inhibited in CNS (e.g., brain) cells and in liver (e.g., hepatocytes) cells.

[0782] Contacting of a cell with an RNAi agent, e.g., a double stranded RNAi agent, may be done in vitro or in vivo. Contacting a cell in vivo with the RNAi agent includes contacting a cell or group of cells within a subject, e.g., a human subject, with the RNAi agent. Combinations of in vitro and in vivo methods of contacting a cell are also possible.

[0783] Contacting a cell may be direct or indirect, as discussed above. Furthermore, contacting a cell may be accomplished via a targeting ligand, including any ligand described herein or known in the art. In some embodiments, the targeting ligand is a carbohydrate moiety, e.g., a GalNAc ligand, or any other ligand that directs the RNAi agent to a site of interest.

[0784] The term “inhibiting,” as used herein, is used interchangeably with “reducing,” “silencing,” “downregulating,” “suppressing” and other similar terms, and includes any level of inhibition. In certain embodiments, a level of inhibition, e.g., for an RNAi agent of the instant disclosure, can be assessed in cell culture conditions, e.g., wherein cells in cell culture are transfected via Lipofectamine™-mediated transfection at a concentration in the vicinity of a cell of 10 nM or less, 1 nM or less, etc. Knockdown of a given RNAi agent can be determined via comparison of pre-treated levels in cell culture versus post-treated levels in cell culture, optionally also comparing against cells treated in parallel with a scrambled or other form of control RNAi agent. Knockdown in cell culture of, e.g., optionally 50% or more, can thereby be identified as indicative of “inhibiting” or “reducing”, “downregulating” or “suppressing”, etc. having occurred. It is expressly contemplated that assessment of targeted mRNA or encoded protein levels (and therefore an extent of “inhibiting”, etc. caused by an RNAi agent of the disclosure) can also be assessed in in vivo systems for the RNAi agents of the instant disclosure, under properly controlled conditions as described in the art.

[0785] The phrase “inhibiting expression of a SNCA gene” or “inhibiting expression of SNCA,” as used herein, includes inhibition of expression of any SNCA gene (such as, e.g., a mouse SNCA gene, a rat SNCA gene, a monkey SNCA gene, or a human SNCA gene) as well as variants or mutants of a SNCA gene that encode a SNCA protein. Thus, the SNCA gene may be a wild-type SNCA gene, a mutant SNCA gene, or a transgenic SNCA gene in the context of a genetically manipulated cell, group of cells, or organism.

[0786] “Inhibiting expression of a SNCA gene” includes any level of inhibition of a SNCA gene, e.g., at least partial suppression of the expression of a SNCA gene, such as an inhibition by at least 20%. In certain embodiments, inhibition is by at least 30%, at least 40%, optionally at least 50%, at least about 60%, at least 70%, at least about 80%, at least 85%, at least 90%, at least 95%, at least 96%, at least 97%, at least 98%, or at least 99%; or to below the level of detection of the assay method.

[0787] The expression of a SNCA gene may be assessed based on the level of any variable associated with SNCA gene expression, e.g., SNCA mRNA level or SNCA protein level, or, for example, the level of neuroinflammation, e.g., microglial and astrocyte activation, and SNCA deposition in areas of the brain associated with neuronal cell death and/or levels of SNCA mRNA/protein within exosomes (neuronal or otherwise).

[0788] Inhibition may be assessed by a decrease in an absolute or relative level of one or more of these variables compared with a control level. The control level may be any type of control level that is utilized in the art, e.g., a pre-dose baseline level, or a level determined from a similar subject, cell, or sample that is untreated or treated with a control (such as, e.g., buffer only control or inactive agent control).

[0789] In some embodiments of the methods of the disclosure, expression of a SNCA gene is inhibited by at least 20%, 30%, 40%, optionally at least 50%, 60%, 70%, 80%, 85%, 90%, or 95%, or to below the level of detection of the assay. In certain embodiments, the methods include a clinically relevant inhibition of expression of SNCA, e.g. as demonstrated by a clinically relevant outcome after treatment of a subject with an agent to reduce the expression of SNCA.

[0790] Inhibition of the expression of a SNCA gene may be manifested by a reduction of the amount of mRNA expressed by a first cell or group of cells (such cells may be present, for example, in a sample derived from a subject) in which a SNCA gene is transcribed and which has or have been treated (e.g., by contacting the cell or cells with an RNAi agent of the disclosure, or by administering an RNAi agent of the disclosure to a subject in which the cells are or were present) such that the expression of a SNCA gene is inhibited, as compared to a second cell or group of cells substantially identical to the first cell or group of cells but which has not or have not been so treated (control cell(s) not treated with an RNAi agent or not treated with an RNAi agent targeted to the gene of interest). The degree of inhibition may be expressed in terms of:

$$\frac{( mRNA in control cells ) - ( mRNA in treated cells )}{( mRNA in control cells )} \cdot 100 \%$$

[0791] In other embodiments, inhibition of the expression of a SNCA gene may be assessed in terms of a reduction of a parameter that is functionally linked to a SNCA gene expression, e.g., SNCA protein expression. SNCA gene silencing may be determined in any cell expressing SNCA, either endogenous or heterologous from an expression construct, and by any assay known in the art.

[0792] Inhibition of the expression of a SNCA protein may be manifested by a reduction in the level of the SNCA protein that is expressed by a cell or group of cells (e.g., the level of protein expressed in a sample derived from a subject). As explained above, for the assessment of mRNA suppression, the inhibiton of protein expression levels in a treated cell or group of cells may similarly be expressed as a percentage of the level of protein in a control cell or group of cells.

[0793] A control cell or group of cells that may be used to assess the inhibition of the expression of a SNCA gene includes a cell or group of cells that has not yet been contacted with an RNAi agent of the disclosure. For example, the control cell or group of cells may be derived from an individual subject (e.g., a human or animal subject) prior to treatment of the subject with an RNAi agent.

[0794] The level of SNCA mRNA that is expressed by a cell or group of cells may be determined using any method known in the art for assessing mRNA expression. In one embodiment, the level of expression of SNCA in a sample is determined by detecting a transcribed polynucleotide, or portion thereof, e.g., mRNA of the SNCA gene. RNA may be extracted from cells using RNA extraction techniques including, for example, using acid phenol/guanidine isothiocyanate extraction (RNAzol B; Biogenesis), RNeasy™ RNA preparation kits (Qiagen®) or PAXgene (PreAnalytix, Switzerland). Typical assay formats utilizing ribonucleic acid hybridization include nuclear run-on assays, RT-PCR, RNase protection assays, northern blotting, in situ hybridization, and microarray analysis. Circulating SNCA mRNA may be detected using methods the described in WO2012/177906, the entire contents of which are hereby incorporated herein by reference.

[0795] In some embodiments, the level of expression of SNCA is determined using a nucleic acid probe. The term “probe”, as used herein, refers to any molecule that is capable of selectively binding to a specific SNCA nucleic acid or protein, or fragment thereof. Probes can be synthesized by one of skill in the art, or derived from appropriate biological preparations. Probes may be specifically designed to be labeled. Examples of molecules that can be utilized as probes include, but are not limited to, RNA, DNA, proteins, antibodies, and organic molecules.

[0796] Isolated mRNA can be used in hybridization or amplification assays that include, but are not limited to, Southern or northern analyses, polymerase chain reaction (PCR) analyses and probe arrays. One method for the determination of mRNA levels involves contacting the isolated mRNA with a nucleic acid molecule (probe) that can hybridize to SNCA mRNA. In one embodiment, the mRNA is immobilized on a solid surface and contacted with a probe, for example by running the isolated mRNA on an agarose gel and transferring the mRNA from the gel to a membrane, such as nitrocellulose. In an alternative embodiment, the probe(s) are immobilized on a solid surface and the mRNA is contacted with the probe(s), for example, in an Affymetrix© gene chip array. A skilled artisan can readily adapt known mRNA detection methods for use in determining the level of SNCA mRNA.

[0797] An alternative method for determining the level of expression of SNCA in a sample involves the process of nucleic acid amplification or reverse transcriptase (to prepare cDNA) of for example mRNA in the sample, e.g., by RT-PCR (the experimental embodiment set forth in Mullis, 1987, U.S. Pat. No. 4,683,202), ligase chain reaction (Barany (1991) Proc. Natl. Acad. Sci. USA 88: 189-193), self-sustained sequence replication (Guatelli et al. (1990) Proc. Natl. Acad. Sci. USA 87: 1874-1878), transcriptional amplification system (Kwoh et al. (1989) Proc. Natl. Acad. Sci. USA 86: 1173-1177), Q-Beta Replicase (Lizardi et al. (1988) Bio/Technology 6: 1197), rolling circle replication (Lizardi et al., U.S. Pat. No. 5,854,033) or any other nucleic acid amplification method, followed by the detection of the amplified molecules using techniques well known to those of skill in the art. These detection schemes are especially useful for the detection of nucleic acid molecules if such molecules are present in very low numbers. In particular aspects of the disclosure, the level of expression of SNCA is determined by quantitative fluorogenic RT-PCR (i.e., the TaqMan™ System), by a Dual-Glo® Luciferase assay, or by other art-recognized method for measurement of SNCA expression or mRNA level.

[0798] The expression level of SNCA mRNA may be monitored using a membrane blot (such as used in hybridization analysis such as northern, Southern, dot, and the like), or microwells, sample tubes, gels, beads or fibers (or any solid support comprising bound nucleic acids). See U.S. Pat. Nos. 5,770,722, 5,874,219, 5,744,305, 5,677,195 and 5,445,934, which are incorporated herein by reference. The determination of SNCA expression level may also comprise using nucleic acid probes in solution.

[0799] In some embodiments, the level of mRNA expression is assessed using branched DNA (bDNA) assays or real time PCR (qPCR). The use of this PCR method is described and exemplified in the Examples presented herein. Such methods can also be used for the detection of SNCA nucleic acids.

[0800] The level of SNCA protein expression may be determined using any method known in the art for the measurement of protein levels. Such methods include, for example, electrophoresis, capillary electrophoresis, high performance liquid chromatography (HPLC), thin layer chromatography (TLC), hyperdiffusion chromatography, fluid or gel precipitin reactions, absorption spectroscopy, a colorimetric assays, spectrophotometric assays, flow cytometry, immunodiffusion (single or double), immunoelectrophoresis, western blotting, radioimmunoassay (RIA), enzyme-linked immunosorbent assays (ELISAs), immunofluorescent assays, electrochemiluminescence assays, and the like. Such assays can also be used for the detection of proteins indicative of the presence or replication of SNCA proteins.

[0801] In some embodiments, the efficacy of the methods of the disclosure in the treatment of a SNCA-related disease is assessed by a decrease in SNCA mRNA level (e.g, by assessment of a CSF sample for SNCA level, by brain biopsy, or otherwise).

[0802] In some embodiments, the efficacy of the methods of the disclosure in the treatment of a SNCA-related disease is assessed by a decrease in SNCA mRNA level (e.g, by assessment of a liver sample for SNCA level, by biopsy, or otherwise).

[0803] In some embodiments of the methods of the disclosure, the RNAi agent is administered to a subject such that the RNAi agent is delivered to a specific site within the subject. The inhibition of expression of SNCA may be assessed using measurements of the level or change in the level of SNCA mRNA or SNCA protein in a sample derived from a specific site within the subject, e.g., CNS cells. In certain embodiments, the methods include a clinically relevant inhibition of expression of SNCA, e.g. as demonstrated by a clinically relevant outcome after treatment of a subject with an agent to reduce the expression of SNCA.

[0804] As used herein, the terms detecting or determining a level of an analyte are understood to mean performing the steps to determine if a material, e.g., protein, RNA, is present. As used herein, methods of detecting or determining include detection or determination of an analyte level that is below the level of detection for the method used.

[0805] IX. Methods of Treating or Preventing SNCA-Associated Neurodegenerative Diseases

[0806] The present disclosure also provides methods of using an RNAi agent of the disclosure or a composition containing an RNAi agent of the disclosure to reduce or inhibit SNCA expression in a cell. The methods include contacting the cell with a dsRNA of the disclosure and maintaining the cell for a time sufficient to obtain degradation of the mRNA transcript of a SNCA gene, thereby inhibiting expression of the SNCA gene in the cell. Reduction in gene expression can be assessed by any methods known in the art. For example, a reduction in the expression of SNCA may be determined by determining the mRNA expression level of SNCA using methods routine to one of ordinary skill in the art, e.g., northern blotting, qRT-PCR; by determining the protein level of SNCA using methods routine to one of ordinary skill in the art, such as western blotting, immunological techniques, and mass-spectrometry.

[0807] In the methods of the disclosure the cell may be contacted in vitro or in vivo, i.e., the cell may be within a subject.

[0808] A cell suitable for treatment using the methods of the disclosure may be any cell that expresses a SNCA gene. A cell suitable for use in the methods of the disclosure may be a mammalian cell, e.g., a primate cell (such as a human cell or a non-human primate cell, e.g., a monkey cell or a chimpanzee cell), a non-primate cell (such as a a rat cell, or a mouse cell. In one embodiment, the cell is a human cell, e.g., a human CNS cell. In one embodiment, the cell is a human cell, e.g., a human liver cell. In one embodiment, the cell is a human cell, e.g., a human CNS cell and a human liver cell.

[0809] SNCA expression is inhibited in the cell by at least about 30, 40, 50, 55, 60, 65, 70, 75, 80, 85, 90, 95, 96, 97, 98, 99, or about 100%, i.e., to below the level of detection. In preferred embodiments, SNCA expression is inhibited by at least 50%.

[0810] The in vivo methods of the disclosure may include administering to a subject a composition containing an RNAi agent, where the RNAi agent includes a nucleotide sequence that is complementary to at least a part of an RNA transcript of the SNCA gene of the mammal to be treated. When the organism to be treated is a mammal such as a human, the composition can be administered by any means known in the art including, but not limited to oral, intraperitoneal, or parenteral routes, including intracranial (e.g., intraventricular, intraparenchymal, and intrathecal), intravenous, intramuscular, intravitreal, subcutaneous, transdermal, airway (aerosol), nasal, rectal, and topical (including buccal and sublingual) administration. In certain embodiments, the compositions are administered by intravenous infusion or injection. In certain embodiments, the compositions are administered by subcutaneous injection. In certain embodiments, the compositions are administered by intrathecal injection.

[0811] In some embodiments, the administration is via a depot injection. A depot injection may release the RNAi agent in a consistent way over a prolonged time period. Thus, a depot injection may reduce the frequency of dosing needed to obtain a desired effect, e.g., a desired inhibition of SNCA, or a therapeutic or prophylactic effect. A depot injection may also provide more consistent serum concentrations. Depot injections may include subcutaneous injections or intramuscular injections. In preferred embodiments, the depot injection is a subcutaneous injection.

[0812] In some embodiments, the administration is via a pump. The pump may be an external pump or a surgically implanted pump. In certain embodiments, the pump is a subcutaneously implanted osmotic pump. In other embodiments, the pump is an infusion pump. An infusion pump may be used for intracranial, intravenous, subcutaneous, arterial, or epidural infusions. In preferred embodiments, the infusion pump is a subcutaneous infusion pump. In other embodiments, the pump is a surgically implanted pump that delivers the RNAi agent to the CNS.

[0813] The mode of administration may be chosen based upon whether local or systemic treatment is desired and based upon the area to be treated. The route and site of administration may be chosen to enhance targeting.

[0814] In one aspect, the present disclosure also provides methods for inhibiting the expression of a SNCA gene in a mammal. The methods include administering to the mammal a composition comprising a dsRNA that targets a SNCA gene in a cell of the mammal and maintaining the mammal for a time sufficient to obtain degradation of the mRNA transcript of the SNCA gene, thereby inhibiting expression of the SNCA gene in the cell. Reduction in gene expression can be assessed by any methods known it the art and by methods, e.g. qRT-PCR, described herein.

[0815] Reduction in protein production can be assessed by any methods known it the art and by methods, e.g. ELISA, described herein. In one embodiment, a CNS biopsy sample or a cerebrospinal fluid (CSF) sample serves as the tissue material for monitoring the reduction in SNCA gene or protein expression (or of a proxy therefore).

[0816] The present disclosure further provides methods of treatment of a subject in need thereof. The treatment methods of the disclosure include administering an RNAi agent of the disclosure to a subject, e.g., a subject that would benefit from inhibition of SNCA expression, in a therapeutically effective amount of an RNAi agent targeting a SNCA gene or a pharmaceutical composition comprising an RNAi agent targeting a SNCA gene.

[0817] In addition, the present disclosure provides methods of preventing, treating or inhibiting the progression of a SNCA-associated neurodegenerative disease or disorder, such as a synucleinopathy, such as PD, multiple system atrophy, Lewy body dementia (LBD), pure autonomic failure (PAF), Pick's disease, progressive supranuclear palsy, dementia pugilistica, parkinsonism linked to chromosome 17, Lytico-Bodig disease, tangle predominant dementia, Argyrophilic grain disease, ganglioglioma, gangliocytoma, meningioangiomatosis, subacute sclerosing panencephalitis, lead encephalopathy, tuberous sclerosis, Hallervorden-Spatz disease, lipofuscinosis, corticobasal degeneration, frontotemporal dementia, frontotemporal lobar degeneration, Alzheimer's disease, Huntington's disease, Down's syndrome, psychosis, schizophrenia and Creutzfeldt-Jakob disease.

[0818] The methods include administering to the subject a therapeutically effective amount of any of the RNAi agent, e.g., dsRNA agents, or the pharmaceutical composition provided herein, thereby preventing, treating or inhibiting the progression of the SNCA-associated neurodegenerative disease or disorder in the subject.

[0819] An RNAi agent of the disclosure may be administered as a “free RNAi agent.” A free RNAi agent is administered in the absence of a pharmaceutical composition. The naked RNAi agent may be in a suitable buffer solution. The buffer solution may comprise acetate, citrate, prolamine, carbonate, or phosphate, or any combination thereof. In one embodiment, the buffer solution is phosphate buffered saline (PBS). The pH and osmolarity of the buffer solution containing the RNAi agent can be adjusted such that it is suitable for administering to a subject.

[0820] Alternatively, an RNAi agent of the disclosure may be administered as a pharmaceutical composition, such as a dsRNA liposomal formulation.

[0821] Subjects that would benefit from a reduction or inhibition of SNCA gene expression are those having a SNCA-associated neurodegenerative disease.

[0822] The disclosure further provides methods for the use of an RNAi agent or a pharmaceutical composition thereof, e.g., for treating a subject that would benefit from reduction or inhibition of SNCA expression, e.g., a subject having a SNCA-associated neurodegenerative disorder, in combination with other pharmaceuticals or other therapeutic methods, e.g., with known pharmaceuticals or known therapeutic methods, such as, for example, those which are currently employed for treating these disorders. For example, in certain embodiments, an RNAi agent targeting SNCA is administered in combination with, e.g., an agent useful in treating a SNCA-associated neurodegenerative disorder as described elsewhere herein or as otherwise known in the art. For example, additional agents and treatments suitable for treating a subject that would benefit from reducton in SNCA expression, e.g., a subject having a SNCA-associated neurodegenerative disorder, may include agents currently used to treat symptoms of SNCA. The RNAi agent and additional therapeutic agents may be administered at the same time or in the same combination, e.g., intrathecally, or the additional therapeutic agent can be administered as part of a separate composition or at separate times or by another method known in the art or described herein.

[0823] Exemplary additional therapeutics and treatments include dopamine-modulating agents, among others, for example, carbidopa-levodopa, levodopa, entacopone, tolcapone, opicapone, pramipexole, ropinirole, apomorphine, rotigotine, selegiline, rasagiline, safinamide, amantadine, istradefylline, trihexyphenidyl, benztropine, rivastigmine, donepezil, galantamine and memantine, as well as physical, occupational and speech therapy, an exercise program including cardiorespiratory, resistance, flexibility, and gait and balance exercises, and deep brain stimulation (DBS) involving the implantation of an electrode into a targeted area of the brain.

[0824] In one embodiment, the method includes administering a composition featured herein such that expression of the target SNCA gene is decreased, for at least one month. In certain embodiments, expression is decreased for at least 2 months, 3 months, or 6 months.

[0825] Optionally, the RNAi agents useful for the methods and compositions featured herein specifically target RNAs (primary or processed) of the target SNCA gene. Compositions and methods for inhibiting the expression of these genes using RNAi agents can be prepared and performed as described herein.

[0826] Administration of the dsRNA according to the methods of the disclosure may result in a reduction of the severity, signs, symptoms, or markers of such diseases or disorders in a patient with a SNCA-associated neurodegenerative disorder. By “reduction” in this context is meant a statistically significant or clinically significant decrease in such level. The reduction can be, for example, at least 5%, 10%, 15%, 20%, 25%, 30%, 35%, 40%, 45%, 50%, 55%, 60%, 65%, 70%, 75%, 80%, 85%, 90%, 95%, or about 100%.

[0827] Efficacy of treatment or prevention of disease can be assessed, for example by measuring disease progression, disease remission, symptom severity, reduction in pain, quality of life, dose of a medication required to sustain a treatment effect, level of a disease marker or any other measurable parameter appropriate for a given disease being treated or targeted for prevention. It is well within the ability of one skilled in the art to monitor efficacy of treatment or prevention by measuring any one of such parameters, or any combination of parameters. For example, efficacy of treatment of a SNCA-associated neurodegenerative disorder may be assessed, for example, by periodic monitoring of a subject's cognition, learning, or memory. Comparisons of the later readings with the initial readings provide a physician an indication of whether the treatment is effective. It is well within the ability of one skilled in the art to monitor efficacy of treatment or prevention by measuring any one of such parameters, or any combination of parameters. In connection with the administration of an RNAi agent targeting SNCA or pharmaceutical composition thereof, “effective against” a SNCA-associated neurodegenerative disorder indicates that administration in a clinically appropriate manner results in a beneficial effect for at least a statistically significant fraction of patients, such as an improvement of symptoms, a cure, a reduction in disease, extension of life, improvement in quality of life, or other effect generally recognized as positive by medical doctors familiar with treating SNCA-associated neurodegenerative disorders and the related causes.

[0828] A treatment or preventive effect is evident when there is a statistically significant improvement in one or more parameters of disease status, or by a failure to worsen or to develop symptoms where they would otherwise be anticipated. As an example, a favorable change of at least 10% in a measurable parameter of disease, and optionally at least 20%, 30%, 40%, 50% or more can be indicative of effective treatment. Efficacy for a given RNAi agent drug or formulation of that drug can also be judged using an experimental animal model for the given disease as known in the art. When using an experimental animal model, efficacy of treatment is evidenced when a statistically significant reduction in a marker or symptom is observed.

[0829] Alternatively, the efficacy can be measured by a reduction in the severity of disease as determined by one skilled in the art of diagnosis based on a clinically accepted disease severity grading scale. Any positive change resulting in e.g., lessening of severity of disease measured using the appropriate scale, represents adequate treatment using an RNAi agent or RNAi agent formulation as described herein.

[0830] Subjects can be administered a therapeutic amount of dsRNA, such as about 0.01 mg/kg to about 200 mg/kg.

[0831] The RNAi agent can be administered intrathecally, via intravitreal injection, or by intravenous infusion over a period of time, on a regular basis. In certain embodiments, after an initial treatment regimen, the treatments can be administered on a less frequent basis. Administration of the RNAi agent can reduce SNCA levels, e.g., in a cell, tissue, blood, CSF sample or other compartment of the patient by at least 20%, 30%, 40%, 50%, 55%, 60%, 65%, 70,% 75%, 80%, 85%, 90%, 95%, 96%, 97%, 98%, or at least about 99% or more. In a preferred embodiment, administration of the RNAi agent can reduce SNCA levels, e.g., in a cell, tissue, blood, CSF sample or other compartment of the patient by at least 50%.

[0832] Before administration of a full dose of the RNAi agent, patients can be administered a smaller dose, such as a 5% infusion reaction, and monitored for adverse effects, such as an allergic reaction. In another example, the patient can be monitored for unwanted immunostimulatory effects, such as increased cytokine (e.g., TNF-alpha or INF-alpha) levels.

[0833] Alternatively, the RNAi agent can be administered subcutaneously, i.e., by subcutaneous injection. One or more injections may be used to deliver the desired, e.g., monthly dose of RNAi agent to a subject. The injections may be repeated over a period of time. The administration may be repeated on a regular basis. In certain embodiments, after an initial treatment regimen, the treatments can be administered on a less frequent basis. A repeat-dose regimine may include administration of a therapeutic amount of RNAi agent on a regular basis, such as monthly or extending to once a quarter, twice per year, once per year. In certain embodiments, the RNAi agent is administered about once per month to about once per quarter (i.e., about once every three months).

[0834] Unless otherwise defined, all technical and scientific terms used herein have the same meaning as commonly understood by one of ordinary skill in the art to which this invention belongs. Although methods and materials similar or equivalent to those described herein can be used in the practice or testing of the RNAi agents and methods featured in the invention, suitable methods and materials are described below. All publications, patent applications, patents, and other references mentioned herein are incorporated by reference in their entirety. In case of conflict, the present specification, including definitions, will control. In addition, the materials, methods, and examples are illustrative only and not intended to be limiting.

[0835] An informal Sequence Listing is also filed herewith and forms part of the specification as filed.

### EXAMPLES

### Example 1: Materials and Methods

[0836] Bioinformatics

[0837] A set of siRNAs targeting the human Synuclein alpha gene (SNCA; human NCBI refseq ID NM_007308.3; NCBI GeneID: 6622; SEQ ID NO: 1) as well the toxicology-species SNCA (XM_005555422.2; SEQ ID NO: 3) ortholog from cynomolgus monkey were designed using custom R and Python scripts. All the siRNAs were designed to have a perfect match to the human SNCA transcripts and a subset either perfect or near-perfect matches to the cynomolgus monkey ortholog. The human SNCA NM_007308 REFSEQ mRNA, version 3 (SEQ ID NO: 1), has a length of 3312 bases. The rationale and method for the set of siRNA designs follows. The predicted efficacy for every potential 23mer siRNA from position 10 through the end was determined with a random forest model derived from the direct measure of mRNA knockdown from several thousand distinct siRNA designs targeting a diverse set of vertebrate genes. For each strand of the siRNA, a custom Python script was used in a brute force search to measure the number and positions of mismatches between the siRNA and all potential alignments in the human transcriptome. Extra weight was given to mismatches in the seed region, defined here as positions 2-9 of the antisense oligonucleotide, as well the cleavage site of the siRNA, defined here as positions 10-11 of the antisense oligonucleotide. The relative weight of the mismatches was 2.8, 1.2, 1 for seed mismatches, cleavage site, and other positions up through antisense position 19. Mismatches in the first position were ignored. A specificity score was calculated for each strand by summing the value of each weighted mismatch. Preference was given to siRNAs whose antisense score in human and cynomolgus monkey was >=2 and predicted efficacy was >=50% knockdown.

[0838] In Vitro Screening—Dual-Glo® Luciferase Assay

[0839] Cos-7 cells (ATCC, Manassas, VA) were grown to near confluence at 37° C. in an atmosphere of 5% CO₂ in DMEM (ATCC) supplemented with 10% FBS, before being released from the plate by trypsinization. Multi-dose experiments were performed at 10 nM and 0.1 nM. siRNA and psiCHECK2-SNCAs (human NM_007308 and mouse NM_009221) plasmid transfections were carried out with plasmids containing the 3′ untranslated region (UTR). Transfection was carried out by adding 5 μL of siRNA duplexes and 5 μL (5 ng) of psiCHECK2 plasmid per well along with 4.9 μL of Opti-MEM plus 0.1 μL of Lipofectamine 2000 per well (Invitrogen, Carlsbad C A. cat #13778-150) and then incubated at room temperature for 15 minutes. The mixture was then added to the cells which were re-suspended in 35 μL of fresh complete media. The transfected cells were incubated at 37° C. in an atmosphere of 5% CO₂.

[0840] Forty-eight hours after the siRNAs and psiCHECK2 plasmid were transfected, Firefly (transfection control) and Renilla (fused to SNCA target sequence) luciferase were measured. First, media was removed from cells. Then Firefly luciferase activity was measured by adding a mixture of 20 μL Dual-Glo® Luciferase Reagent and 20 μL DMEM to each well. The mixture was incubated at room temperature for 30 minutes before luminescense (500 nm) was measured on a Spectramax (Molecular Devices) to detect the Firefly luciferase signal. Renilla luciferase activity was measured by adding a mixture of 20 μL of room temperature of Dual-Glo® Stop & Glo® Buffer and 0.1 μL Dual-Glo® Stop & Glo® Substrate to each well and the plates were incubated for 10-15 minutes before luminescence was again measured to determine the Renilla luciferase signal. The Dual-Glo® Stop & Glo® mixture quenches the firefly luciferase signal and sustained luminescence for the Renilla luciferase reaction. siRNA activity was determined by normalizing the Renilla (SNCA) signal to the Firefly (control) signal within each well. The magnitude of siRNA activity was then assessed relative to cells that were transfected with the same vector but were not treated with siRNA or were treated with a non-targeting siRNA. All transfections were done with n=4.

[0841] In Vitro Screening—Cell Culture and Transfections

[0842] Cells were transfected by adding 4.9 μL of Opti-MEM plus 0.1 μL of RNAiMAX per well (Invitrogen, Carlsbad C A. cat #13778-150) to 5 μL of siRNA duplexes per well, with 4 replicates of each siRNA duplex, into a 384-well plate, and incubated at room temperature for 15 minutes. 40 μL of MEDIA containing ˜5×103 cells were then added to the siRNA mixture. Cells were incubated for 24 hours prior to RNA purification. Experiments were performed at 10 nM and 0.1 nM. Transfection experiments were performed in human hepatoma Hep3B cells (ATCC HB-8064) with EMEM (ATCC catalog no. 30-2003), mouse neuroblastoma Neuro-2A cells (ATCC CCL-131) with EMEM media, and human neuroblastoma BE(2)-C, HeLa, and B16F10 cells. BE(2)-C cells (ATCC CRL-2268) were grown in EMEM:F12 media (Gibco catalog no. 11765054). HeLa cells and B16F10 cells were grown according to standard protocols.

[0843] In Vitro Screening—cDNA Synthesis Using ABI High Capacity cDNA Reverse Transcription Kit (Applied Biosystems, Foster City, CA, Cat #4368813)

[0844] 12 μL of a master mix containing 1.2 μL 10× Buffer, 0.48 μL 25× dNTPs, 1.2 μL 10× Random primers, 0.6 μL Reverse Transcriptase, 0.6 μL RNase inhibitor and 7.92 μL of H2O per reaction was added to the bead bound RNA isolated above. Plates were sealed, mixed, and incubated on an electromagnetic shaker for 10 minutes at room temperature, followed by 2h incubation at 37° C. Branched DNA assays were also performed using the aforementioned protocol.

[0845] In Vitro Screening—Real Time PCR

[0846] 2 μL of cDNA were added to a master mix containing 0.5 μL of human or mouse GAPDH TaqMan Probe (ThermoFisher cat 4352934E or 4351309) and 0.5 μL of appropriate SNCA probe (Thermo Fisher Taqman human: Hs00268077, mouse: Mm00485946) and 5 μL Lightcycler 480 probe master mix (Roche Cat #04887301001) per well in a 384 well plates (Roche cat #04887301001). Real time PCR was done in a LightCycler480 Real Time PCR system (Roche). Each duplex was tested with N=4 and data were normalized to cells transfected with a non-targeting control siRNA. To calculate relative fold change, real time data were analyzed using the ΔΔCt method and normalized to assays performed with cells transfected with a non-targeting control siRNA.

### Example 2: Knock-Down of Endogenous SNCA and SNCA Expressed Via Dual-Luciferase psiCHECK2 Vector

[0847] A series of SNCA iRNA agents were generated, for which modified (based on key in Table 1) and unmodified sequences are listed in Tables 2 and 3. BE2-(C), HeLa, and B16F10 cells were used to screen for knock-down of endogenous SNCA transcript using the duplexes shown in Tables 2 and 3. Cos7 cells expressing the dual-luciferase psiCHECK2 vector were used to screen for inhibition of exogenous SNCA transcript using the duplexes of Tables 2 and 3. Duplex siRNA was added to cells at concentrations of 10 nM and 0.1 nM. The observed levels of SNCA transcript in BE(2)-Cells are shown in Tables 4, 5, and 9. The observed levels of SNCA transcript in HeLa and B16F10 cells are shown in Table 6. The observed levels of SNCA observed via the dual-luciferase system are shown in Table 7. Many duplexes were identified that showed robust SNCA inhibition.

### Example 3: In Vivo Evaluation of SNCA RNAi Agents

[0848] Selected SNCA-targeting RNAi agents were evaluated for in vivo efficacy and lead compound identification, by screening for human SNCA knockdown in mice expressing human SNCA via AAV transgene. The selected RNAi agents for such studies included: duplexes targeting the 3′UTR of SNCA: AD-464778, AD-464782, AD-464694, AD-464634, AD-464779; and duplexes targeting the coding sequence of SNCA: AD-464590, AD-464313, AD-464314, AD-464585, AD-464586, AD-464592, and AD-464229. All aforementioned duplexes were chemically modified sequences having L96 GalNAc ligands (Table 2) as indicated in Table 1. Corresponding unmodified sequences are shown in Table 3.

[0849] To identify RNAi in vivo efficacy in mice, human SNCA was first transduced in the mice. A construct encoding the full Homo sapiens SNCA transcript and 3′ UTR (refer to Hs00240906_ml) was packaged in AAV8 capsids and transduced at a level of 2.0E+10 genome copies/dose in 8-week-old C57BL/6 female mice. At 7 days post-AAV administration, the duplexes recited above or 1× PBS were subcutaneously injected at 3 mg/kg. 1 week post duplex dosing, mouse livers were harvested and SNCA expression was assessed using Taq Man assay Hs00240906_ml. Data were normalized to PBS-treated samples. cDNA synthesis and qRT-PCR were performed using routine techniques. Results are shown in FIG. 1 and Table 8. A majority of tested RNAi agents exhibited SNCA inhibition in vivo.

[0850] The in vivo efficacies of a specific huSNCA 3′-UTR-targeting duplex, AD-464634, and a specific huSNCA coding sequence-targeting duplex, AD-464314, were assessed further (refer to FIG. 2 for AD-464634 and AD-464314 sequences and modification patterns), at 3 mg/kg and 10 mg/kg doses, and at 7 day and 14 day time points. Robust knockdown of human SNCA was observed in mice treated with both the huSNCA 3′-UTR-targeting AD-464634 duplex and the huSNCA coding sequence-targeting AD-464314 duplex, at both day 7 and day 14 time points (FIG. 3). Dose-response was observed for both tested duplexes, particularly at the 14 day time point. With strong huSNCA knockdown observed even at the 14 day time point, both duplexes were identified as suitable for further in vivo lead development studies.

[0851] The efficacy of AAV transduction in producing mice that expressed human SNCA in the liver was also confirmed by real-time PCR. Human SNCA expression levels were specifically assessed in liver tissue of huSNCA AAV-transduced mice (respectively huSNCA AAV-transduced with 2e10 or 2e11 viral particles), with huSNCA levels measured at days 7, 14 and 21 post-transduction. Detectable levels of human SNCA in mouse liver were observed at all time points, in a dose-responsive manner with respect to levels of viral particles administered (higher levels of AAV transduction yielded lower threshold cycle counts (cT); FIG. 4).

[0852] The mouse/rat cross-reactivities of selected duplexes were also assessed in vivo, in rat SNCA AAV-transduced mice. in mice were also examined in mice transduced with rat SNCA. A construct encoding the full Rattus norvegicus SNCA transcript and 3′ UTR (refer to NM_019169.2) was packaged in AAV8 capsids and transduced at a level of 2.0E+10 genome copies/dose in 8-week-old C57BL/6 female mice. At 14 days week post-AAV administration, duplexes (AD-476344, AD-475666, AD-476306, AD-476061, AD-464814, AD-475728, and AD-4644229) or 1×PBS were subcutaneously injected at 3 mg/kg in the mice. 14 days post duplex dosing, livers were harvested and SNCA expression was assessed using Taq Man assay Rn00569821_ml. Data were normalized to PBS-treated samples. cDNA synthesis and qRT-PCR were performed using routine techniques. AD-476061, AD-464814 and AD-475728, as well as possibly AD-464229, exhibited significant rat SNCA knockdown (FIG. 5).

### Example 4: A Hotspot Walk Across the SNCA Transcript Identified Many Further RNAi Agents with Robust SNCA Knockdown Properties

[0853] Additional modified SNCA-targeting RNAi duplexes possessing sequences and modification patterns as shown in Table 12 were synthesized and assessed for human SNCA knockdown when administered at 0.1 nM, 1.0 nM and 10 nM in the environment of Be(2)C cells. Human SNCA knockdown results were obtained, and siRNAs and associated knockdown results were rank-ordered by 1 nM fit value (Table 14). A variety of further SNCA-targeting duplexes capable of inhibiting human SNCA were thereby identified, with strong correlation between measured SNCA knockdown levels in the hotspot walk and calculated 1 nM fit values used to rank-order duplexes observed (FIG. 6).

[0854] The “mRNA” sequences of the Informal Sequence Listing and certain of the “mRNA target” sequences listed herein may be noted as reciting thymine (T) residues rather than uracil (U) residues. As is apparent to one of ordinary skill in the art, such sequences reciting “T” residues rather than “U” residues can be derived from NCBI accession records that list, as “mRNA” sequences, the DNA sequences (not RNA sequences) that directly correspond to mRNA sequences. Such DNA sequences that directly correspond to mRNA sequences technically constitute the DNA sequence that is the complement of the cDNA (complementary DNA) sequence for an indicated mRNA. Thus, while the mRNA target sequence does, in fact, actually include uracil (U) rather than thymine (T), the NCBI record-derived “mRNA” sequence includes thymine (T) residues rather than uracil (U) residues.

TABLE 1
Abbreviations of nucleotide monomers used in nucleic acid
sequence representation.
It will be understood that these monomers, when present in an
oligonucleotide, are mutually linked by 5′-3′-phosphodiester bonds.

| Abbreviation | Nucleotide(s) |
|---|---|
| A | Adenosine-3′-phosphate |
| Ab | beta-L-adenosine-3′-phosphate |
| Abs | beta-L-adenosine-3′-phosphorothioate |
| Af | 2′-fluoroadenosine-3′-phosphate |
| Afs | 2′-fluoroadenosine-3′-phosphorothioate |
| As | adenosine-3′-phosphorothioate |
| C | cytidine-3′-phosphate |
| Cb | beta-L-cytidine-3′-phosphate |
| Cbs | beta-L-cytidine-3′-phosphorothioate |
| Cf | 2′-fluorocytidine-3′-phosphate |
| Cfs | 2′-fluorocytidine-3′-phosphorothioate |
| Cs | cytidine-3′-phosphorothioate |
| G | guanosine-3′-phosphate |
| Gb | beta-L-guanosine-3′-phosphate |
| Gbs | beta-L-guanosine-3′-phosphorothioate |
| Gf | 2′-fluoroguanosine-3′-phosphate |
| Gfs | 2′-fluoroguanosine-3′-phosphorothioate |
| Gs | guanosine-3′-phosphorothioate |
| T | 5′-methyluridine-3′-phosphate |
| Tf | 2′-fluoro-5-methyluridine-3′-phosphate |
| Tfs | 2′-fluoro-5-methyluridine-3′-phosphorothioate |
| Ts | 5-methyluridine-3′-phosphorothioate |
| U | Uridine-3′-phosphate |
| Uf | 2′-fluorouridine-3′-phosphate |
| Ufs | 2′-fluorouridine-3′-phosphorothioate |
| Us | uridine-3′-phosphorothioate |
| N | any nucleotide, modified or unmodified |
| a | 2′-O-methyladenosine-3′-phosphate |
| as | 2′-O-methyladenosine-3′-phosphorothioate |
| C | 2′-O-methylcytidine-3′-phosphate |
| CS | 2′-O-methylcytidine-3′-phosphorothioate |
| g | 2′-O-methylguanosine-3′-phosphate |
| gs | 2′-O-methylguanosine-3′-phosphorothioate |
| t | 2′-O-methyl-5-methyluridine-3′-phosphate |
| ts | 2′-O-methyl-5-methyluridine-3′-phosphorothioate |
| u | 2′-O-methyluridine-3′-phosphate |
| us | 2′-O-methyluridine-3′-phosphorothioate |
| S | phosphorothioate linkage |
| L96 | N-[tris(GalNAc-alkyl)-amidodecanoyl)]-4-hydroxyprolinol Hyp-(GalNAc-alkyl)3 (Hyp-(GalNAc-alkyl)3) |
| | [chemical structure] |
| Y34 | 2-hydroxymethyl-tetrahydrofurane-4-methoxy-3-phosphate (abasic 2′-OMe furanose) |
| Y44 | inverted abasic DNA (2-hydroxymethyl-tetrahydrofurane-5-phosphate) |
| (Agn) | Adenosine-glycol nucleic acid (GNA) S-Isomer |
| (Cgn) | Cytidine-glycol nucleic acid (GNA) S-Isomer |
| (Ggn) | Guanosine-glycol nucleic acid (GNA) S-Isomer |
| (Tgn) | Thymidine-glycol nucleic acid (GNA) S-Isomer |
| P | Phosphate |
| VP | vinyl phosphonate (i.e., 5′-(E)-vinylphosphonate) |
| (Aam) | 2′-O-(N-methylacetamide)adenosine-3′-phosphate |
| (Aams) | 2′-O-(N-methylacetamide)adenosine-3′-phosphorothioate |
| (Gam) | 2′-O-(N-methylacetamide)guanosine-3′-phosphate |
| (Gams) | 2′-O-(N-methylacetamide)guanosine-3′-phosphorothioate |
| (Tam) | 2′-O-(N-methylacetamide)thymidine-3′-phosphate |
| (Tams) | 2′-O-(N-methylacetamide)thymidine-3′-phosphorothioate |
| dA | 2′-deoxyadenosine-3′-phosphate |
| dAs | 2′-deoxyadenosine-3′-phosphorothioate |
| dC | 2′-deoxycytidine-3′-phosphate |
| dCs | 2′-deoxycytidine-3′-phosphorothioate |
| dG | 2′-deoxyguanosine-3′-phosphate |
| dGs | 2′-deoxyguanosine-3′-phosphorothioate |
| dT | 2′-deoxythymidine-3′-phosphate |
| dTs | 2′-deoxythymidine-3′-phosphorothioate |
| dU | 2′-deoxyuridine |
| dUs | 2′-deoxyuridine-3′-phosphorothioate |
| (Aco) | 2′-O-methoxyethyladenosine-3′-phosphate |
| (Aeos) | 2′-O-methoxyethyladenosine-3′-phosphorothioate |
| (Geo) | 2′-O-methoxyethylguanosine-3′-phosphate |
| (Geos) | 2′-O-methoxyethylguanosine-3-phosphorothioate |
| (Teo) | 2′-O-methoxyethyl-5-methyluridine-3′-phosphate |
| (Teos) | 2′-O-methoxyethyl-5-methyluridine-3′-phosphorothioate |
| (m5Ceo) | 2′-O-methoxyethyl-5-methylcytidine-3′-phosphate |
| (m5Ceos) | 2′-O-methoxyethyl-5-methylcytidine-3′-phosphorothioate |
| (A3m) | 3′-O-methyladenosine-2′-phosphate |
| (A3mx) | 3′-O-methyl-xylofuranosyladenosine-2′-phosphate |
| (G3m) | 3′-O-methylguanosine-2′-phosphate |
| (G3mx) | 3′-O-methyl-xylofuranosylguanosine-2′-phosphate |
| (C3m) | 3′-O-methylcytidine-2′-phosphate |
| (C3mx) | 3′-O-methyl-xylofuranosylcytidine-2′-phosphate |
| (U3m) | 3′-O-methyluridine-2′-phosphate |
| U3mx) | 3-O-methyl-xylofuranosyluridine-2′-phosphate |
| (m5Cam) | 2′-O-(N-methylacetamide)-5-methylcytidine-3′-phosphate |
| (m5Cams) | 2′-O-(N-methylacetamide)-5-methylcytidine-3′-phosphorothioate |
| (Ahd) | 2′-O-hexadecyl-adenosine-3′-phosphate |
| (Ahds) | 2′-O-hexadecyl-adenosine-3′-phosphorothioate |
| (Ghd) | 2′-O-hexadecyl-guanosine-3′-phosphate |
| (Ghds) | 2′-O-hexadecyl-guanosine-3′-phosphorothioate |
| (Chd) | 2′-O-hexadecyl-cytidine-3′-phosphate |
| (Chds) | 2′-O-hexadecyl-cytidine-3′-phosphorothioate |
| (Uhd) | 2′-O-hexadecyl-uridine-3′-phosphate |
| (Uhds) | 2′-O-hexadecyl-uridine-3′-phosphorothioate |
| (pshe) | Hydroxyethylphosphorothioate |
| (A2p) | adenosine-2′-phosphate |
| (C2p) | cytidine-2′-phosphate |
| (G2p) | guanosine-2′-phosphate |
| (U2p) | uridine-2′-phosphate |
| (A2ps) | adenosine-2′-phosphorothioate |
| (C2ps) | cytidine-2′-phosphorothioate |
| (G2ps) | guanosine-2′-phosphorothioate |
| (U2ps) | uridine-2′-phosphorothioate |

TABLE 2
Modified Sense and Antisense Strand Sequences of Human and Primate SNCA_siRNAs.

| | Sense | | SEQ | Antisense | | SEQ | | SEQ |
|---|---|---|---|---|---|---|---|---|
| Duplex | Oligo | | ID | Oligo | | ID | | ID |
| Name | Name | Oligo Sequence | NO: | Name | Oligo Sequence | NO: | mRNA target_sequence | NO: |
| AD- | A- | gsascga(Chd)AfgUfGfUfgguguaaagaL96 | 13 | A- | VPusCfsuuua(Cgn)accacaCfuGfucgucsgsa | 103 | UCGACGACAGUGUGGUGUAAAGG | 193 |
| 595724 | 1142132.1 | | | 1142133.1 | | | | |
| AD- | A- | asusgaa(Ahd)GfgAfCfUfuucaaaggcaL96 | 14 | A- | VPusGfsccuu(Tgn)gaaaguCfcUfuucausgsa | 104 | UCAUGAAAGGACUUUCAAAGGCC | 194 |
| 595769 | 1142222.1 | | | 1142223.1 | | | | |
| AD- | A- | asasaga(Ghd)GfgUfGfUfucucuauguaL96 | 15 | A- | VPusAfscaua(Ggn)agaacaCfcCfucuuususg | 105 | CAAAAGAGGGUGUUCUCUAUGUA | 195 |
| 595854 | 1142392.1 | | | 1142393.1 | | | | |
| AD- | A- | asasgag(Ghd)GfuGfUfUfcucuauguaaL96 | 16 | A- | VPusUfsacau(Agn)gagaacAfcCfcucuususu | 106 | AAAAGAGGGUGUUCUCUAUGUAG | 196 |
| 595855 | 1142394.1 | | | 1142395.1 | | | | |
| AD- | A- | csuscua(Uhd)GfuAfGfGfcuccaaaacaL96 | 17 | A- | VPusGfsuuuu(Ggn)gagccuAfcAfuagagsasa | 107 | UUCUCUAUGUAGGCUCCAAAACC | 197 |
| 595866 | 1142416.1 | | | 1142417.1 | | | | |
| AD- | A- | asasgac(Chd)AfaAfGfAfgcaagugacaL96 | 18 | A- | VPusGfsucac(Tgn)ugcucuUfuGfgucuuscsu | 108 | AGAAGACCAAAGAGCAAGUGACA | 198 |
| 595926 | 1142536.1 | | | 1142537.1 | | | | |
| AD- | A- | ascsaau(Ghd)AfgGfCfUfuaugaaaugaL96 | 19 | A- | VPusCfsauuu(Cgn)auaagcCfuCfauuguscsa | 109 | UGACAAUGAGGCUUAUGAAAUGC | 199 |
| 596096 | 1142876.1 | | | 1142877.1 | | | | |
| AD- | A- | usgsagg(Chd)UfuAfUfGfaaaugccuuaL96 | 20 | A- | VPusAfsaggc(Agn)uuucauAfaGfccucasusu | 110 | AAUGAGGCUUAUGAAAUGCCUUC | 200 |
| 596100 | 1142884.1 | | | 1142885.1 | | | | |
| AD- | A- | gsgsaag(Ghd)GfuAfUfCfaagacuacgaL96 | 21 | A- | VPusCfsguag(Tgn)cuugauAfcCfcuuccsusc | 111 | GAGGAAGGGUAUCAAGACUACGA | 201 |
| 596124 | 1142932.1 | | | 1142933.1 | | | | |
| AD- | A- | asasggg(Uhd)AfuCfAfAfgacuacgaaaL96 | 22 | A- | VPusUfsucgu(Agn)gucuugAfuAfcccuuscsc | 112 | GGAAGGGUAUCAAGACUACGAAC | 202 |
| 596126 | 1142936.1 | | | 1142937.1 | | | | |
| AD- | A- | asgsggu(Ahd)UfcAfAfGfacuacgaacaL96 | 23 | A- | VPusGfsuucg(Tgn)agucuuGfaUfacccususc | 113 | GAAGGGUAUCAAGACUACGAACC | 203 |
| 596127 | 1142938.1 | | | 1142939.1 | | | | |
| AD- | A- | gsgsgua(Uhd)CfaAfGfAfcuacgaaccaL96 | 24 | A- | VPusGfsguuc(Ggn)uagucuUfgAfuacccsusu | 114 | AAGGGUAUCAAGACUACGAACCU | 204 |
| 596128 | 1142940.1 | | | 1142941.1 | | | | |
| AD- | A- | gsgsuau(Chd)AfaGfAfCfuacgaaccuaL96 | 25 | A- | VPusAfsgguu(Cgn)guagucUfuGfauaccscsu | 115 | AGGGUAUCAAGACUACGAACCUG | 205 |
| 596129 | 1142942.1 | | | 1142943.1 | | | | |
| AD- | A- | gsusauc(Ahd)AfgAfCfUfacgaaccugaL96 | 26 | A- | VPusCfsaggu(Tgn)cguaguCfuUfgauacscsc | 116 | GGGUAUCAAGACUACGAACCUGA | 206 |
| 596130 | 1142944.1 | | | 1142945.1 | | | | |
| AD- | A- | usasuca(Ahd)GfaCfUfAfcgaaccugaaL96 | 27 | A- | VPusUfscagg(Tgn)ucguagUfcUfugauascsc | 117 | GGUAUCAAGACUACGAACCUGAA | 207 |
| 596131 | 1142946.1 | | | 1142947.1 | | | | |
| AD- | A- | uscsaag(Ahd)CfuAfCfGfaaccugaagaL96 | 28 | A- | VPusCfsuuca(Ggn)guucguAfgUfcuugasusa | 118 | UAUCAAGACUACGAACCUGAAGC | 208 |
| 596133 | 1142950.1 | | | 1142951.1 | | | | |
| AD- | A- | gsascua(Chd)GfaAfCfCfugaagccuaaL96 | 29 | A- | VPusUfsaggc(Tgn)ucagguUfcGfuagucsusu | 119 | AAGACUACGAACCUGAAGCCUAA | 209 |
| 596137 | 1142958.1 | | | 1142959.1 | | | | |
| AD- | A- | asasccu(Ghd)AfaGfCfCfuaagaaauaaL96 | 30 | A- | VPusUfsauuu(Cgn)uuaggcUfuCfagguuscsg | 120 | CGAACCUGAAGCCUAAGAAAUAU | 210 |
| 596144 | 1142972.1 | | | 1142973.1 | | | | |
| AD- | A- | csusgaa(Ghd)CfcUfAfAfgaaauaucuaL96 | 31 | A- | VPusAfsgaua(Tgn)uucuuaGfgCfuucagsgsu | 121 | ACCUGAAGCCUAAGAAAUAUCUU | 211 |
| 596147 | 1142978.1 | | | 1142979.1 | | | | |
| AD- | A- | usgscuc(Chd)CfaGfUfUfucuugagauaL96 | 32 | A- | VPusAfsucuc(Agn)agaaacUfgGfgagcasasa | 122 | UUUGCUCCCAGUUUCUUGAGAUC | 212 |
| 596168 | 1143020.1 | | | 1143021.1 | | | | |
| AD- | A- | gscsucc(Chd)AfgUfUfUfcuugagaucaL96 | 33 | A- | VPusGfsaucu(Cgn)aagaaaCfuGfggagcsasa | 123 | UUGCUCCCAGUUUCUUGAGAUCU | 213 |
| 596169 | 1143022.1 | | | 1143023.1 | | | | |
| AD- | A- | csusccc(Ahd)GfuUfUfCfuugagaucuaL96 | 34 | A- | VPusAfsgauc(Tgn)caagaaAfcUfgggagscsa | 124 | UGCUCCCAGUUUCUUGAGAUCUG | 214 |
| 596170 | 1143024.1 | | | 1143025.1 | | | | |
| AD- | A- | uscscca(Ghd)UfuUfCfUfugagaucugaL96 | 35 | A- | VPusCfsagau(Cgn)ucaagaAfaCfugggasgsc | 125 | GCUCCCAGUUUCUUGAGAUCUGC | 215 |
| 596171 | 1143026.1 | | | 1143027.1 | | | | |
| AD- | A- | cscscag(Uhd)UfuCfUfUfgagaucugcaL96 | 36 | A- | VPusGfscaga(Tgn)cucaagAfaAfcugggsasg | 126 | CUCCCAGUUUCUUGAGAUCUGCU | 216 |
| 596172 | 1143028.1 | | | 1143029.1 | | | | |
| AD- | A- | asgsuuu(Chd)UfuGfAfGfaucugcugaaL96 | 37 | A- | VPusUfscagc(Agn)gaucucAfaGfaaacusgsg | 127 | CCAGUUUCUUGAGAUCUGCUGAC | 217 |
| 596175 | 1143034.1 | | | 1143035.1 | | | | |
| AD- | A- | ususucu(Uhd)GfaGfAfUfcugcugacaaL96 | 38 | A- | VPusUfsguca(Ggn)cagaucUfcAfagaaascsu | 128 | AGUUUCUUGAGAUCUGCUGACAG | 218 |
| 596177 | 1143038.1 | | | 1143039.1 | | | | |
| AD- | A- | asgsugc(Uhd)CfaGfUfUfccaaugugcaL96 | 39 | A- | VPusGfscaca(Tgn)uggaacUfgAfgcacususg | 129 | CAAGUGCUCAGUUCCAAUGUGCC | 219 |
| 596215 | 1143114.1 | | | 1143115.1 | | | | |
| AD- | A- | gsusgcc(Chd)AfgUfCfAfugacauuucaL96 | 40 | A- | VPusGfsaaau(Ggn)ucaugaCfuGfggcacsasu | 130 | AUGUGCCCAGUCAUGACAUUUCU | 220 |
| 596231 | 1143146.1 | | | 1143147.1 | | | | |
| AD- | A- | cscsagu(Chd)AfuGfAfCfauuucucaaaL96 | 41 | A- | VPusUfsugag(Agn)aaugucAfuGfacuggsgsc | 131 | GCCCAGUCAUGACAUUUCUCAAA | 221 |
| 596235 | 1143154.1 | | | 1143155.1 | | | | |
| AD- | A- | csasuca(Ghd)CfaGfUfGfauugaaguaaL96 | 42 | A- | VPusUfsacuu(Cgn)aaucacUfgCfugaugsgsa | 132 | UCCAUCAGCAGUGAUUGAAGUAU | 222 |
| 596283 | 1143250.1 | | | 1143251.1 | | | | |
| AD- | A- | ususuca(Chd)UfgAfAfGfugaauacauaL96 | 43 | A- | VPusAfsugua(Tgn)ucacuuCfaGfugaaasgsg | 133 | CCUUUCACUGAAGUGAAUACAUG | 223 |
| 596319 | 1143322.1 | | | 1143323.1 | | | | |
| AD- | A- | ususcac(Uhd)GfaAfGfUfgaauacaugaL96 | 44 | A- | VPusCfsaugu(Agn)uucacuUfcAfgugaasasg | 134 | CUUUCACUGAAGUGAAUACAUGG | 224 |
| 596320 | 1143324.1 | | | 1143325.1 | | | | |
| AD- | A- | csascug(Ahd)AfgUfGfAfauacaugguaL96 | 45 | A- | VPusAfsccau(Ggn)uauucaCfuUfcagugsasa | 135 | UUCACUGAAGUGAAUACAUGGUA | 225 |
| 596322 | 1143328.1 | | | 1143329.1 | | | | |
| AD- | A- | ascsuga(Ahd)GfuGfAfAfuacaugguaaL96 | 46 | A- | VPusUfsacca(Tgn)guauucAfcUfucagusgsa | 136 | UCACUGAAGUGAAUACAUGGUAG | 226 |
| 596323 | 1143330.1 | | | 1143331.1 | | | | |
| AD- | A- | usgsaag(Uhd)GfaAfUfAfcaugguagcaL96 | 47 | A- | VPusGfscuac(Cgn)auguauUfcAfcuucasgsu | 137 | ACUGAAGUGAAUACAUGGUAGCA | 227 |
| 596325 | 1143334.1 | | | 1143335.1 | | | | |
| AD- | A- | gsasagu(Ghd)AfaUfAfCfaugguagcaaL96 | 48 | A- | VPusUfsgcua(Cgn)cauguaUfuCfacuucsasg | 138 | CUGAAGUGAAUACAUGGUAGCAG | 228 |
| 596326 | 1143336.1 | | | 1143337.1 | | | | |
| AD- | A- | usgsgau(Uhd)UfuGfUfGfgcuucaaucaL96 | 49 | A- | VPusGfsauug(Agn)agccacAfaAfauccascsa | 139 | UGUGGAUUUUGUGGCUUCAAUCU | 229 |
| 596362 | 1143408.1 | | | 1143409.1 | | | | |
| AD- | A- | asasaaa(Chd)AfcCfUfAfagugacuacaL96 | 50 | A- | VPusGfsuagu(Cgn)acuuagGfuGfuuuuusasa | 140 | UUAAAAACACCUAAGUGACUACC | 230 |
| 596390 | 1143464.1 | | | 1143465.1 | | | | |
| AD- | A- | asasaac(Ahd)CfcUfAfAfgugacuaccaL96 | 51 | A- | VPusGfsguag(Tgn)cacuuaGfgUfguuuususa | 141 | UAAAAACACCUAAGUGACUACCA | 231 |
| 596391 | 1143466.1 | | | 1143467.1 | | | | |
| AD- | A- | asasaca(Chd)CfuAfAfGfugacuaccaaL96 | 52 | A- | VPusUfsggua(Ggn)ucacuuAfgGfuguuususu | 142 | AAAAACACCUAAGUGACUACCAC | 232 |
| 596392 | 1143468.1 | | | 1143469.1 | | | | |
| AD- | A- | ascscua(Ahd)GfuGfAfCfuaccacuuaaL96 | 53 | A- | VPusUfsaagu(Ggn)guagucAfcUfuaggusgsu | 143 | ACACCUAAGUGACUACCACUUAU | 233 |
| 596396 | 1143476.1 | | | 1143477.1 | | | | |
| AD- | A- | gsusgac(Uhd)AfcCfAfCfuuauuucuaaL96 | 54 | A- | VPusUfsagaa(Agn)uaagugGfuAfgucacsusu | 144 | AAGUGACUACCACUUAUUUCUAA | 234 |
| 596402 | 1143488.1 | | | 1143489.1 | | | | |
| AD- | A- | csusguu(Ghd)UfuCfAfGfaaguuguuaaL96 | 55 | A- | VPusUfsaaca(Agn)cuucugAfaCfaacagscsa | 145 | UGCUGUUGUUCAGAAGUUGUUAG | 235 |
| 596425 | 1143534.1 | | | 1143535.1 | | | | |
| AD- | A- | usgsuug(Uhd)UfcAfGfAfaguuguuagaL96 | 56 | A- | VPusCfsuaac(Agn)acuucuGfaAfcaacasgsc | 146 | GCUGUUGUUCAGAAGUUGUUAGU | 236 |
| 596426 | 1143536.1 | | | 1143537.1 | | | | |
| AD- | A- | gsusugu(Uhd)CfaGfAfAfguuguuaguaL96 | 57 | A- | VPusAfscuaa(Cgn)aacuucUfgAfacaacsasg | 147 | CUGUUGUUCAGAAGUUGUUAGUG | 237 |
| 596427 | 1143538.1 | | | 1143539.1 | | | | |
| AD- | A- | ususcag(Ahd)AfgUfUfGfuuagugauuaL96 | 58 | A- | VPusAfsauca(Cgn)uaacaaCfuUfcugaascsa | 148 | UGUUCAGAAGUUGUUAGUGAUUU | 238 |
| 596431 | 1143546.1 | | | 1143547.1 | | | | |
| AD- | A- | asasguu(Ghd)UfuAfGfUfgauuugcuaaL96 | 59 | A- | VPusUfsagca(Agn)aucacuAfaCfaacuuscsu | 149 | AGAAGUUGUUAGUGAUUUGCUAU | 239 |
| 596436 | 1143556.1 | | | 1143557.1 | | | | |
| AD- | A- | ususuua(Ahd)UfgAfUfAfcugucuaagaL96 | 60 | A- | VPusCfsuuag(Agn)caguauCfaUfuaaaasgsa | 150 | UCUUUUAAUGAUACUGUCUAAGA | 240 |
| 596469 | 1143622.1 | | | 1143623.1 | | | | |
| AD- | A- | asusacu(Ghd)UfcUfAfAfgaauaaugaaL96 | 61 | A- | VPusUfscauu(Agn)uucuuaGfaCfaguauscsa | 151 | UGAUACUGUCUAAGAAUAAUGAC | 241 |
| 596477 | 1143638.1 | | | 1143639.1 | | | | |
| AD- | A- | asgscau(Ghd)AfaAfCfUfaugcaccuaaL96 | 62 | A- | VPusUfsaggu(Ggn)cauaguUfuCfaugcuscsa | 152 | UGAGCAUGAAACUAUGCACCUAU | 242 |
| 596515 | 1143714.1 | | | 1143715.1 | | | | |
| AD- | A- | csasuga(Ahd)AfcUfAfUfgcaccuauaaL96 | 63 | A- | VPusUfsauag(Ggn)ugcauaGfuUfucaugscsu | 153 | AGCAUGAAACUAUGCACCUAUAA | 243 |
| 596517 | 1143718.1 | | | 1143719.1 | | | | |
| AD- | A- | ususuau(Chd)CfcAfUfCfucacuuuaaaL96 | 64 | A- | VPusUfsuaaa(Ggn)ugagauGfgGfauaaasasa | 154 | UUUUUAUCCCAUCUCACUUUAAU | 244 |
| 596605 | 1143894.1 | | | 1143895.1 | | | | |
| AD- | A- | ususauc(Chd)CfaUfCfUfcacuuuaauaL96 | 65 | A- | VPusAfsuuaa(Agn)gugagaUfgGfgauaasasa | 155 | UUUUAUCCCAUCUCACUUUAAUA | 245 |
| 596606 | 1143896.1 | | | 1143897.1 | | | | |
| AD- | A- | uscscca(Uhd)CfuCfAfCfuuuaauaauaL96 | 66 | A- | VPusAfsuuau(Tgn)aaagugAfgAfugggasusa | 156 | UAUCCCAUCUCACUUUAAUAAUA | 246 |
| 596609 | 1143902.1 | | | 1143903.1 | | | | |
| AD- | A- | asasaau(Ghd)GfaAfCfAfuuaacccuaaL96 | 67 | A- | VPusUfsaggg(Tgn)uaauguUfcCfauuuuscsu | 157 | AGAAAAUGGAACAUUAACCCUAC | 247 |
| 596709 | 1144102.1 | | | 1144103.1 | | | | |
| AD- | A- | asusuag(Chd)AfcAfUfAfuuagcacauaL96 | 68 | A- | VPusAfsugug(Cgn)uaauauGfuGfcuaausgsu | 158 | ACAUUAGCACAUAUUAGCACAUU | 248 |
| 597019 | 1144722.1 | | | 1144723.1 | | | | |
| AD- | A- | uscsucu(Uhd)UfcAfGfGfgaagaucuaaL96 | 69 | A- | VPusUfsagau(Cgn)uucccuGfaAfagagasasa | 159 | UUUCUCUUUCAGGGAAGAUCUAU | 249 |
| 597232 | 1145148.1 | | | 1145149.1 | | | | |
| AD- | A- | asasguc(Ahd)CfuAfGfUfagaaaguauaL96 | 70 | A- | VPusAfsuacu(Tgn)ucuacuAfgUfgacuususu | 160 | AAAAGUCACUAGUAGAAAGUAUA | 250 |
| 597297 | 1145278.1 | | | 1145279.1 | | | | |
| AD- | A- | asgsuca(Chd)UfaGfUfAfgaaaguauaaL96 | 71 | A- | VPusUfsauac(Tgn)uucuacUfaGfugacususu | 161 | AAAGUCACUAGUAGAAAGUAUAA | 251 |
| 597298 | 1145280.1 | | | 1145281.1 | | | | |
| AD- | A- | csasgaa(Uhd)AfuUfCfUfagacaugcuaL96 | 72 | A- | VPusAfsgcau(Ggn)ucuagaAfuAfuucugsusc | 162 | GACAGAAUAUUCUAGACAUGCUA | 252 |
| 597325 | 1145334.1 | | | 1145335.1 | | | | |
| AD- | A- | asgsaau(Ahd)UfuCfUfAfgacaugcuaaL96 | 73 | A- | VPusUfsagca(Tgn)gucuagAfaUfauucusgsu | 163 | ACAGAAUAUUCUAGACAUGCUAG | 253 |
| 597326 | 1145336.1 | | | 1145337.1 | | | | |
| AD- | A- | gsasaua(Uhd)UfcUfAfGfacaugcuagaL96 | 74 | A- | VPusCfsuagc(Agn)ugucuaGfaAfuauucsusg | 164 | CAGAAUAUUCUAGACAUGCUAGC | 254 |
| 597327 | 1145338.1 | | | 1145339.1 | | | | |
| AD- | A- | usasgac(Ahd)UfgCfUfAfgcaguuuauaL96 | 75 | A- | VPusAfsuaaa(Cgn)ugcuagCfaUfgucuasgsa | 165 | UCUAGACAUGCUAGCAGUUUAUA | 255 |
| 597335 | 1145354.1 | | | 1145355.1 | | | | |
| AD- | A- | gsasgga(Ahd)UfgAfGfUfgacuauaagaL96 | 76 | A- | VPusCfsuuau(Agn)gucacuCfaUfuccucscsu | 166 | AGGAGGAAUGAGUGACUAUAAGG | 256 |
| 597397 | 1145478.1 | | | 1145479.1 | | | | |
| AD- | A- | asgsgaa(Uhd)GfaGfUfGfacuauaaggaL96 | 77 | A- | VPusCfscuua(Tgn)agucacUfcAfuuccuscsc | 167 | GGAGGAAUGAGUGACUAUAAGGA | 257 |
| 597398 | 1145480.1 | | | 1145481.1 | | | | |
| AD- | A- | gsasgug(Ahd)CfuAfUfAfaggaugguuaL96 | 78 | A- | VPusAfsacca(Tgn)ccuuauAfgUfcacucsasu | 168 | AUGAGUGACUAUAAGGAUGGUUA | 258 |
| 597404 | 1145492.1 | | | 1145493.1 | | | | |
| AD- | A- | ascsuau(Ahd)AfgGfAfUfgguuaccauaL96 | 79 | A- | VPusAfsuggu(Agn)accaucCfuUfauaguscsa | 169 | UGACUAUAAGGAUGGUUACCAUA | 259 |
| 597409 | 1145502.1 | | | 1145503.1 | | | | |
| AD- | A- | csusaua(Ahd)GfgAfUfGfguuaccauaaL96 | 80 | A- | VPusUfsaugg(Tgn)aaccauCfcUfuauagsusc | 170 | GACUAUAAGGAUGGUUACCAUAG | 260 |
| 597410 | 1145504.1 | | | 1145505.1 | | | | |
| AD- | A- | gsasugg(Uhd)UfaCfCfAfuagaaacuuaL96 | 81 | A- | VPusAfsaguu(Tgn)cuauggUfaAfccaucscsu | 171 | AGGAUGGUUACCAUAGAAACUUC | 261 |
| 597417 | 1145518.1 | | | 1145519.1 | | | | |
| AD- | A- | ascsuac(Uhd)AfcAfGfAfgugcuaagcaL96 | 82 | A- | VPusGfscuua(Ggn)cacucuGfuAfguaguscsu | 172 | AGACUACUACAGAGUGCUAAGCU | 262 |
| 597443 | 1145570.1 | | | 1145571.1 | | | | |
| AD- | A- | usgscua(Ahd)GfcUfGfCfaugugucauaL96 | 83 | A- | VPusAfsugac(Agn)caugcaGfcUfuagcascsu | 173 | AGUGCUAAGCUGCAUGUGUCAUC | 263 |
| 597455 | 1145594.1 | | | 1145595.1 | | | | |
| AD- | A- | asasgcu(Ghd)CfaUfGfUfgucaucuuaaL96 | 84 | A- | VPusUfsaaga(Tgn)gacacaUfgCfagcuusasg | 174 | CUAAGCUGCAUGUGUCAUCUUAC | 264 |
| 597459 | 1145602.1 | | | 1145603.1 | | | | |
| AD- | A- | asgscug(Chd)AfuGfUfGfucaucuuacaL96 | 85 | A- | VPusGfsuaag(Agn)ugacacAfuGfcagcususa | 175 | UAAGCUGCAUGUGUCAUCUUACA | 265 |
| 597460 | 1145604.1 | | | 1145605.1 | | | | |
| AD- | A- | csasgua(Uhd)AfuUfUfCfaggaagguuaL96 | 86 | A- | VPusAfsaccu(Tgn)ccugaaAfuAfuacugsusu | 176 | AACAGUAUAUUUCAGGAAGGUUA | 266 |
| 597534 | 1145752.1 | | | 1145753.1 | | | | |
| AD- | A- | asasauc(Uhd)AfcCfUfAfaagcagcauaL96 | 87 | A- | VPusAfsugcu(Ggn)cuuuagGfuAfgauuusasa | 177 | UUAAAUCUACCUAAAGCAGCAUA | 267 |
| 597569 | 1145822.1 | | | 1145823.1 | | | | |
| AD- | A- | asgsucc(Uhd)AfgGfUfUfuauuuugcaaL96 | 88 | A- | VPusUfsgcaa(Agn)auaaacCfuAfggacusgsg | 178 | CCAGUCCUAGGUUUAUUUUGCAG | 268 |
| 597861 | 1146406.1 | | | 1146407.1 | | | | |
| AD- | A- | cscsuag(Ghd)UfuUfAfUfuuugcagacaL96 | 89 | A- | VPusGfsucug(Cgn)aaaauaAfaCfcuaggsasc | 179 | GUCCUAGGUUUAUUUUGCAGACU | 269 |
| 597864 | 1146412.1 | | | 1146413.1 | | | | |
| AD- | A- | cscsaag(Uhd)UfaUfUfCfagccucauaaL96 | 90 | A- | VPusUfsauga(Ggn)gcugaaUfaAfcuuggsgsa | 180 | UCCCAAGUUAUUCAGCCUCAUAU | 270 |
| 597894 | 1146472.1 | | | 1146473.1 | | | | |
| AD- | A- | gsusuau(Uhd)CfaGfCfCfucauaugacaL96 | 91 | A- | VPusGfsucau(Agn)ugaggcUfgAfauaacsusu | 181 | AAGUUAUUCAGCCUCAUAUGACU | 271 |
| 597898 | 1146480.1 | | | 1146481.1 | | | | |
| AD- | A- | ususauu(Chd)AfgCfCfUfcauaugacuaL96 | 92 | A- | VPusAfsguca(Tgn)augaggCfuGfaauaascsu | 182 | AGUUAUUCAGCCUCAUAUGACUC | 272 |
| 597899 | 1146482.1 | | | 1146483.1 | | | | |
| AD- | A- | usasuuc(Ahd)GfcCfUfCfauaugacucaL96 | 93 | A- | VPusGfsaguc(Agn)uaugagGfcUfgaauasasc | 183 | GUUAUUCAGCCUCAUAUGACUCC | 273 |
| 597900 | 1146484.1 | | | 1146485.1 | | | | |
| AD- | A- | uscsggc(Uhd)UfuAfCfCfaaaacaguuaL96 | 94 | A- | VPusAfsacug(Tgn)uuugguAfaAfgccgascsc | 184 | GGUCGGCUUUACCAAAACAGUUC | 274 |
| 597925 | 1146534.1 | | | 1146535.1 | | | | |
| AD- | A- | gsgscuu(Uhd)AfcCfAfAfaacaguucaaL96 | 95 | A- | VPusUfsgaac(Tgn)guuuugGfuAfaagccsgsa | 185 | UCGGCUUUACCAAAACAGUUCAG | 275 |
| 597927 | 1146538.1 | | | 1146539.1 | | | | |
| AD- | A- | asasaca(Ghd)UfuCfAfGfagugcacuuaL96 | 96 | A- | VPusAfsagug(Cgn)acucugAfaCfuguuususg | 186 | CAAAACAGUUCAGAGUGCACUUU | 276 |
| 597937 | 1146558.1 | | | 1146559.1 | | | | |
| AD- | A- | asgsagu(Ghd)CfaCfUfUfuggcacacaaL96 | 97 | A- | VPusUfsgugu(Ggn)ccaaagUfgCfacucusgsa | 187 | UCAGAGUGCACUUUGGCACACAA | 277 |
| 597946 | 1146576.1 | | | 1146577.1 | | | | |
| AD- | A- | asascag(Ahd)AfcAfAfUfcuaauguguaL96 | 98 | A- | VPusAfscaca(Tgn)uagauuGfuUfcuguuscsc | 188 | GGAACAGAACAAUCUAAUGUGUG | 278 |
| 597972 | 1146628.1 | | | 1146629.1 | | | | |
| AD- | A- | csasgaa(Chd)AfaUfCfUfaauguguggaL96 | 99 | A- | VPusCfscaca(Cgn)auuagaUfuGfuucugsusu | 189 | AACAGAACAAUCUAAUGUGUGGU | 279 |
| 597974 | 1146632.1 | | | 1146633.1 | | | | |
| AD- | A- | usasaug(Uhd)GfuGfGfUfuugguauucaL96 | 100 | A- | VPusGfsaaua(Cgn)caaaccAfcAfcauuasgsa | 190 | UCUAAUGUGUGGUUUGGUAUUCC | 280 |
| 597984 | 1146652.1 | | | 1146653.1 | | | | |
| AD- | A- | gsusgug(Ghd)UfuUfGfGfuauuccaagaL96 | 101 | A- | VPusCfsuugg(Agn)auaccaAfaCfcacacsasu | 191 | AUGUGUGGUUUGGUAUUCCAAGU | 281 |
| 597988 | 1146660.1 | | | 1146661.1 | | | | |
| AD- | A- | usgsugg(Uhd)UfuGfGfUfauuccaaguaL96 | 102 | A- | VPusAfscuug(Ggn)aauaccAfaAfccacascsa | 192 | UGUGUGGUUUGGUAUUCCAAGUG | 282 |
| 597989 | 1146662.1 | | | 1146663.1 | | | | |
| AD- | A | gsascga(Chd)AfgUfGfUfgguguaaagaL96 | 463 | A- | VPusCfsuuua(Cgn)accacaCfuGfucgucsgsa | 553 | UCGACGACAGUGUGGUGUAAAGG | 643 |
| 595724.1 | 1142132.1 | | | 1142133.1 | | | | |
| AD- | A- | asusgaa(Ahd)GfgAfCfUfuucaaaggcaL96 | 464 | A- | VPusGfsccuu(Tgn)gaaaguCfcUfuucausgsa | 554 | UCAUGAAAGGACUUUCAAAGGCC | 644 |
| 595769.1 | 1142222.1 | | | 1142223.1 | | | | |
| AD- | A | asasaga(Ghd)GfgUfGfUfucucuauguaL96 | 465 | A- | VPusAfscaua(Ggn)agaacaCfcCfucuuususg | 555 | CAAAAGAGGGUGUUCUCUAUGUA | 645 |
| 595854.1 | 1142392.1 | | | 1142393.1 | | | | |
| AD- | A- | asasgag(Ghd)GfuGfUfUfcucuauguaaL96 | 466 | A- | VPusUfsacau(Agn)gagaacAfcCfcucuususu | 556 | AAAAGAGGGUGUUCUCUAUGUAG | 646 |
| 595855.1 | 1142394.1 | | | 1142395.1 | | | | |
| AD- | A- | csuscua(Uhd)GfuAfGfGfcuccaaaacaL96 | 467 | A- | VPusGfsuuuu(Ggn)gagccuAfcAfuagagsasa | 557 | UUCUCUAUGUAGGCUCCAAAACC | 647 |
| 595866.1 | 1142416.1 | | | 1142417.1 | | | | |
| AD- | A- | asasgac(Chd)AfaAfGfAfgcaagugacaL96 | 468 | A- | VPusGfsucac(Tgn)ugcucuUfuGfgucuuscsu | 558 | AGAAGACCAAAGAGCAAGUGACA | 648 |
| 595926.1 | 1142536.1 | | | 1142537.1 | | | | |
| AD- | A- | ascsaau(Ghd)AfgGfCfUfuaugaaaugaL96 | 469 | A- | VPusCfsauuu(Cgn)auaagcCfuCfauuguscsa | 559 | UGACAAUGAGGCUUAUGAAAUGC | 649 |
| 596096.1 | 1142876.1 | | | 1142877.1 | | | | |
| AD- | A- | usgsagg(Chd)UfuAfUfGfaaaugccuuaL96 | 470 | A- | VPusAfsaggc(Agn)uuucauAfaGfccucasusu | 560 | AAUGAGGCUUAUGAAAUGCCUUC | 650 |
| 596100.1 | 1142884.1 | | | 1142885.1 | | | | |
| AD- | A- | gsgsaag(Ghd)GfuAfUfCfaagacuacgaL96 | 471 | A- | VPusCfsguag(Tgn)cuugauAfcCfcuuccsusc | 561 | GAGGAAGGGUAUCAAGACUACGA | 651 |
| 596124.1 | 1142932.1 | | | 1142933.1 | | | | |
| AD- | A- | asasggg(Uhd)AfuCfAfAfgacuacgaaaL96 | 472 | A- | VPusUfsucgu(Agn)gucuugAfuAfcccuuscsc | 562 | GGAAGGGUAUCAAGACUACGAAC | 652 |
| 596126.1 | 1142936.1 | | | 1142937.1 | | | | |
| AD- | A- | asgsggu(Ahd)UfcAfAfGfacuacgaacaL96 | 473 | A- | VPusGfsuucg(Tgn)agucuuGfaUfacccususc | 563 | GAAGGGUAUCAAGACUACGAACC | 653 |
| 596127.1 | 1142938.1 | | | 1142939.1 | | | | |
| AD- | A- | gsgsgua(Uhd)CfaAfGfAfcuacgaaccaL96 | 474 | A- | VPusGfsguuc(Ggn)uagucuUfgAfuacccsusu | 564 | AAGGGUAUCAAGACUACGAACCU | 654 |
| 596128.1 | 1142940.1 | | | 1142941.1 | | | | |
| AD- | A- | gsgsuau(Chd)AfaGfAfCfuacgaaccuaL96 | 475 | A- | VPusAfsgguu(Cgn)guagucUfuGfauaccscsu | 565 | AGGGUAUCAAGACUACGAACCUG | 655 |
| 596129.1 | 1142942.1 | | | 1142943.1 | | | | |
| AD- | A- | gsusauc(Ahd)AfgAfCfUfacgaaccugaL96 | 476 | A- | VPusCfsaggu(Tgn)cguaguCfuUfgauacscsc | 566 | GGGUAUCAAGACUACGAACCUGA | 656 |
| 596130.1 | 1142944.1 | | | 1142945.1 | | | | |
| AD- | A- | usasuca(Ahd)GfaCfUfAfcgaaccugaaL96 | 477 | A- | VPusUfscagg(Tgn)ucguagUfcUfugauascsc | 567 | GGUAUCAAGACUACGAACCUGAA | 657 |
| 596131.1 | 1142946.1 | | | 1142947.1 | | | | |
| AD- | A- | uscsaag(Ahd)CfuAfCfGfaaccugaagaL96 | 478 | A- | VPusCfsuuca(Ggn)guucguAfgUfcuugasusa | 568 | UAUCAAGACUACGAACCUGAAGC | 658 |
| 596133.1 | 1142950.1 | | | 1142951.1 | | | | |
| AD- | A- | gsascua(Chd)GfaAfCfCfugaagccuaaL96 | 479 | A- | VPusUfsaggc(Tgn)ucagguUfcGfuagucsusu | 569 | AAGACUACGAACCUGAAGCCUAA | 659 |
| 596137.1 | 1142958.1 | | | 1142959.1 | | | | |
| AD- | A- | asasccu(Ghd)AfaGfCfCfuaagaaauaaL96 | 480 | A- | VPusUfsauuu(Cgn)uuaggcUfuCfagguuscsg | 570 | CGAACCUGAAGCCUAAGAAAUAU | 660 |
| 596144.1 | 1142972.1 | | | 1142973.1 | | | | |
| AD- | A- | csusgaa(Ghd)CfcUfAfAfgaaauaucuaL96 | 481 | A- | VPusAfsgaua(Tgn)uucuuaGfgCfuucagsgsu | 571 | ACCUGAAGCCUAAGAAAUAUCUU | 661 |
| 596147.1 | 1142978.1 | | | 1142979.1 | | | | |
| AD- | A- | usgscuc(Chd)CfaGfUfUfucuugagauaL96 | 482 | A- | VPusAfsucuc(Agn)agaaacUfgGfgagcasasa | 572 | UUUGCUCCCAGUUUCUUGAGAUC | 662 |
| 596168.1 | 1143020.1 | | | 1143021.1 | | | | |
| AD- | A- | gscsucc(Chd)AfgUfUfUfcuugagaucaL96 | 483 | A- | VPusGfsaucu(Cgn)aagaaaCfuGfggagcsasa | 573 | UUGCUCCCAGUUUCUUGAGAUCU | 663 |
| 596169.1 | 1143022.1 | | | 1143023.1 | | | | |
| AD- | A- | csusccc(Ahd)GfuUfUfCfuugagaucuaL96 | 484 | A- | VPusAfsgauc(Tgn)caagaaAfcUfgggagscsa | 574 | UGCUCCCAGUUUCUUGAGAUCUG | 664 |
| 596170.1 | 1143024.1 | | | 1143025.1 | | | | |
| AD- | A- | uscscca(Ghd)UfuUfCfUfugagaucugaL96 | 485 | A- | VPusCfsagau(Cgn)ucaagaAfaCfugggasgsc | 575 | GCUCCCAGUUUCUUGAGAUCUGC | 665 |
| 596171.1 | 1143026.1 | | | 1143027.1 | | | | |
| AD- | A- | cscscag(Uhd)UfuCfUfUfgagaucugcaL96 | 486 | A- | VPusGfscaga(Tgn)cucaagAfaAfcugggsasg | 576 | CUCCCAGUUUCUUGAGAUCUGCU | 666 |
| 596172.1 | 1143028.1 | | | 1143029.1 | | | | |
| AD- | A- | asgsuuu(Chd)UfuGfAfGfaucugcugaaL96 | 487 | A- | VPusUfscagc(Agn)gaucucAfaGfaaacusgsg | 577 | CCAGUUUCUUGAGAUCUGCUGAC | 667 |
| 596175.1 | 1143034.1 | | | 1143035.1 | | | | |
| AD- | A- | ususucu(Uhd)GfaGfAfUfcugcugacaaL96 | 488 | A- | VPusUfsguca(Ggn)cagaucUfcAfagaaascsu | 578 | AGUUUCUUGAGAUCUGCUGACAG | 668 |
| 596177.1 | 1143038.1 | | | 1143039.1 | | | | |
| AD- | A- | asgsugc(Uhd)CfaGfUfUfccaaugugcaL96 | 489 | A- | VPusGfscaca(Tgn)uggaacUfgAfgcacususg | 579 | CAAGUGCUCAGUUCCAAUGUGCC | 669 |
| 596215.1 | 1143114.1 | | | 1143115.1 | | | | |
| AD- | A- | gsusgcc(Chd)AfgUfCfAfugacauuucaL96 | 490 | A- | VPusGfsaaau(Ggn)ucaugaCfuGfggcacsasu | 580 | AUGUGCCCAGUCAUGACAUUUCU | 670 |
| 596231.1 | 1143146.1 | | | 1143147.1 | | | | |
| AD- | A- | cscsagu(Chd)AfuGfAfCfauuucucaaaL96 | 491 | A- | VPusUfsugag(Agn)aaugucAfuGfacuggsgsc | 581 | GCCCAGUCAUGACAUUUCUCAAA | 671 |
| 596235.1 | 1143154.1 | | | 1143155.1 | | | | |
| AD- | A- | csasuca(Ghd)CfaGfUfGfauugaaguaaL96 | 492 | A- | VPusUfsacuu(Cgn)aaucacUfgCfugaugsgsa | 582 | UCCAUCAGCAGUGAUUGAAGUAU | 672 |
| 596283.1 | 1143250.1 | | | 1143251.1 | | | | |
| AD- | A- | ususuca(Chd)UfgAfAfGfugaauacauaL96 | 493 | A- | VPusAfsugua(Tgn)ucacuuCfaGfugaaasgsg | 583 | CCUUUCACUGAAGUGAAUACAUG | 673 |
| 596319.1 | 1143322.1 | | | 1143323.1 | | | | |
| AD- | A- | ususcac(Uhd)GfaAfGfUfgaauacaugaL96 | 494 | A- | VPusCfsaugu(Agn)uucacuUfcAfgugaasasg | 584 | CUUUCACUGAAGUGAAUACAUGG | 674 |
| 596320.1 | 1143324.1 | | | 1143325.1 | | | | |
| AD- | A- | csascug(Ahd)AfgUfGfAfauacaugguaL96 | 495 | A- | VPusAfsccau(Ggn)uauucaCfuUfcagugsasa | 585 | UUCACUGAAGUGAAUACAUGGUA | 675 |
| 596322.1 | 1143328.1 | | | 1143329.1 | | | | |
| AD- | A- | ascsuga(Ahd)GfuGfAfAfuacaugguaaL96 | 496 | A- | VPusUfsacca(Tgn)guauucAfcUfucagusgsa | 586 | UCACUGAAGUGAAUACAUGGUAG | 676 |
| 596323.1 | 1143330.1 | | | 1143331.1 | | | | |
| AD- | A- | usgsaag(Uhd)GfaAfUfAfcaugguagcaL96 | 497 | A- | VPusGfscuac(Cgn)auguauUfcAfcuucasgsu | 587 | ACUGAAGUGAAUACAUGGUAGCA | 677 |
| 596325.1 | 1143334.1 | | | 1143335.1 | | | | |
| AD- | A- | gsasagu(Ghd)AfaUfAfCfaugguagcaaL96 | 498 | A- | VPusUfsgcua(Cgn)cauguaUfuCfacuucsasg | 588 | CUGAAGUGAAUACAUGGUAGCAG | 678 |
| 596326.1 | 1143336.1 | | | 1143337.1 | | | | |
| AD- | A- | usgsgau(Uhd)UfuGfUfGfgcuucaaucaL96 | 499 | A- | VPusGfsauug(Agn)agccacAfaAfauccascsa | 589 | UGUGGAUUUUGUGGCUUCAAUCU | 679 |
| 596362.1 | 1143408.1 | | | 1143409.1 | | | | |
| AD- | A- | asasaaa(Chd)AfcCfUfAfagugacuacaL96 | 500 | A- | VPusGfsuagu(Cgn)acuuagGfuGfuuuuusasa | 590 | UUAAAAACACCUAAGUGACUACC | 680 |
| 596390.1 | 1143464.1 | | | 1143465.1 | | | | |
| AD- | A- | asasaac(Ahd)CfcUfAfAfgugacuaccaL96 | 501 | A- | VPusGfsguag(Tgn)cacuuaGfgUfguuuususa | 591 | UAAAAACACCUAAGUGACUACCA | 681 |
| 596391.1 | 1143466.1 | | | 1143467.1 | | | | |
| AD- | A- | asasaca(Chd)CfuAfAfGfugacuaccaaL96 | 502 | A- | VPusUfsggua(Ggn)ucacuuAfgGfuguuususu | 592 | AAAAACACCUAAGUGACUACCAC | 682 |
| 596392.1 | 1143468.1 | | | 1143469.1 | | | | |
| AD- | A- | ascscua(Ahd)GfuGfAfCfuaccacuuaaL96 | 503 | A- | VPusUfsaagu(Ggn)guagucAfcUfuaggusgsu | 593 | ACACCUAAGUGACUACCACUUAU | 683 |
| 596396.1 | 1143476.1 | | | 1143477.1 | | | | |
| AD- | A- | gsusgac(Uhd)AfcCfAfCfuuauuucuaaL96 | 504 | A- | VPusUfsagaa(Agn)uaagugGfuAfgucacsusu | 594 | AAGUGACUACCACUUAUUUCUAA | 684 |
| 596402.1 | 1143488.1 | | | 1143489.1 | | | | |
| AD- | A- | csusguu(Ghd)UfuCfAfGfaaguuguuaaL96 | 505 | A- | VPusUfsaaca(Agn)cuucugAfaCfaacagscsa | 595 | UGCUGUUGUUCAGAAGUUGUUAG | 685 |
| 596425.1 | 1143534.1 | | | 1143535.1 | | | | |
| AD- | A- | usgsuug(Uhd)UfcAfGfAfaguuguuagaL96 | 506 | A- | VPusCfsuaac(Agn)acuucuGfaAfcaacasgsc | 596 | GCUGUUGUUCAGAAGUUGUUAGU | 686 |
| 596426.1 | 1143536.1 | | | 1143537.1 | | | | |
| AD- | A- | gsusugu(Uhd)CfaGfAfAfguuguuaguaL96 | 507 | A- | VPusAfscuaa(Cgn)aacuucUfgAfacaacsasg | 597 | CUGUUGUUCAGAAGUUGUUAGUG | 687 |
| 596427.1 | 1143538.1 | | | 1143539.1 | | | | |
| AD- | A- | ususcag(Ahd)AfgUfUfGfuuagugauuaL96 | 508 | A- | VPusAfsauca(Cgn)uaacaaCfuUfcugaascsa | 598 | UGUUCAGAAGUUGUUAGUGAUUU | 688 |
| 596431.1 | 1143546.1 | | | 1143547.1 | | | | |
| AD- | A- | asasguu(Ghd)UfuAfGfUfgauuugcuaaL96 | 509 | A- | VPusUfsagca(Agn)aucacuAfaCfaacuuscsu | 599 | AGAAGUUGUUAGUGAUUUGCUAU | 689 |
| 596436.1 | 1143556.1 | | | 1143557.1 | | | | |
| AD- | A- | ususuua(Ahd)UfgAfUfAfcugucuaagaL96 | 510 | A- | VPusCfsuuag(Agn)caguauCfaUfuaaaasgsa | 600 | UCUUUUAAUGAUACUGUCUAAGA | 690 |
| 596469.1 | 1143622.1 | | | 1143623.1 | | | | |
| AD- | A- | asusacu(Ghd)UfcUfAfAfgaauaaugaaL96 | 511 | A- | VPusUfscauu(Agn)uucuuaGfaCfaguauscsa | 601 | UGAUACUGUCUAAGAAUAAUGAC | 691 |
| 596477.1 | 1143638.1 | | | 1143639.1 | | | | |
| AD- | A- | asgscau(Ghd)AfaAfCfUfaugcaccuaaL96 | 512 | A- | VPusUfsaggu(Ggn)cauaguUfuCfaugcuscsa | 602 | UGAGCAUGAAACUAUGCACCUAU | 692 |
| 596515.1 | 1143714.1 | | | 1143715.1 | | | | |
| AD- | A- | csasuga(Ahd)AfcUfAfUfgcaccuauaaL96 | 513 | A- | VPusUfsauag(Ggn)ugcauaGfuUfucaugscsu | 603 | AGCAUGAAACUAUGCACCUAUAA | 693 |
| 596517.1 | 1143718.1 | | | 1143719.1 | | | | |
| AD- | A- | ususuau(Chd)CfcAfUfCfucacuuuaaaL96 | 514 | A- | VPusUfsuaaa(Ggn)ugagauGfgGfauaaasasa | 604 | UUUUUAUCCCAUCUCACUUUAAU | 694 |
| 596605.1 | 1143894.1 | | | 1143895.1 | | | | |
| AD- | A- | ususauc(Chd)CfaUfCfUfcacuuuaauaL96 | 515 | A- | VPusAfsuuaa(Agn)gugagaUfgGfgauaasasa | 605 | UUUUAUCCCAUCUCACUUUAAUA | 695 |
| 596606.1 | 1143896.1 | | | 1143897.1 | | | | |
| AD- | A- | uscscca(Uhd)CfuCfAfCfuuuaauaauaL96 | 516 | A- | VPusAfsuuau(Tgn)aaagugAfgAfugggasusa | 606 | UAUCCCAUCUCACUUUAAUAAUA | 696 |
| 596609.1 | 1143902.1 | | | 1143903.1 | | | | |
| AD- | A- | asasaau(Ghd)GfaAfCfAfuuaacccuaaL96 | 517 | A- | VPusUfsaggg(Tgn)uaauguUfcCfauuuuscsu | 607 | AGAAAAUGGAACAUUAACCCUAC | 697 |
| 596709.1 | 1144102.1 | | | 1144103.1 | | | | |
| AD- | A- | asusuag(Chd)AfcAfUfAfuuagcacauaL96 | 518 | A- | VPusAfsugug(Cgn)uaauauGfuGfcuaausgsu | 608 | ACAUUAGCACAUAUUAGCACAUU | 698 |
| 597019.1 | 1144722.1 | | | 1144723.1 | | | | |
| AD- | A- | uscsucu(Uhd)UfcAfGfGfgaagaucuaaL96 | 519 | A- | VPusUfsagau(Cgn)uucccuGfaAfagagasasa | 609 | UUUCUCUUUCAGGGAAGAUCUAU | 699 |
| 597232.1 | 1145148.1 | | | 1145149.1 | | | | |
| AD- | A- | asasguc(Ahd)CfuAfGfUfagaaaguauaL96 | 520 | A- | VPusAfsuacu(Tgn)ucuacuAfgUfgacuususu | 610 | AAAAGUCACUAGUAGAAAGUAUA | 700 |
| 597297.1 | 1145278.1 | | | 1145279.1 | | | | |
| AD- | A- | asgsuca(Chd)UfaGfUfAfgaaaguauaaL96 | 521 | A- | VPusUfsauac(Tgn)uucuacUfaGfugacususu | 611 | AAAGUCACUAGUAGAAAGUAUAA | 701 |
| 597298.1 | 1145280.1 | | | 1145281.1 | | | | |
| AD- | A- | csasgaa(Uhd)AfuUfCfUfagacaugcuaL96 | 522 | A- | VPusAfsgcau(Ggn)ucuagaAfuAfuucugsusc | 612 | GACAGAAUAUUCUAGACAUGCUA | 702 |
| 597325.1 | 1145334.1 | | | 1145335.1 | | | | |
| AD- | A- | asgsaau(Ahd)UfuCfUfAfgacaugcuaaL96 | 523 | A- | VPusUfsagca(Tgn)gucuagAfaUfauucusgsu | 613 | ACAGAAUAUUCUAGACAUGCUAG | 703 |
| 597326.1 | 1145336.1 | | | 1145337.1 | | | | |
| AD- | A- | gsasaua(Uhd)UfcUfAfGfacaugcuagaL96 | 524 | A- | VPusCfsuagc(Agn)ugucuaGfaAfuauucsusg | 614 | CAGAAUAUUCUAGACAUGCUAGC | 704 |
| 597327.1 | 1145338.1 | | | 1145339.1 | | | | |
| AD- | A- | usasgac(Ahd)UfgCfUfAfgcaguuuauaL96 | 525 | A- | VPusAfsuaaa(Cgn)ugcuagCfaUfgucuasgsa | 615 | UCUAGACAUGCUAGCAGUUUAUA | 705 |
| 597335.1 | 1145354.1 | | | 1145355.1 | | | | |
| AD- | A- | gsasgga(Ahd)UfgAfGfUfgacuauaagaL96 | 526 | A- | VPusCfsuuau(Agn)gucacuCfaUfuccucscsu | 616 | AGGAGGAAUGAGUGACUAUAAGG | 706 |
| 597397.1 | 1145478.1 | | | 1145479.1 | | | | |
| AD- | A- | asgsgaa(Uhd)GfaGfUfGfacuauaaggaL96 | 527 | A- | VPusCfscuua(Tgn)agucacUfcAfuuccuscsc | 617 | GGAGGAAUGAGUGACUAUAAGGA | 707 |
| 597398.1 | 1145480.1 | | | 1145481.1 | | | | |
| AD- | A- | gsasgug(Ahd)CfuAfUfAfaggaugguuaL96 | 528 | A- | VPusAfsacca(Tgn)ccuuauAfgUfcacucsasu | 618 | AUGAGUGACUAUAAGGAUGGUUA | 708 |
| 597404.1 | 1145492.1 | | | 1145493.1 | | | | |
| AD- | A- | ascsuau(Ahd)AfgGfAfUfgguuaccauaL96 | 529 | A- | VPusAfsuggu(Agn)accaucCfuUfauaguscsa | 619 | UGACUAUAAGGAUGGUUACCAUA | 709 |
| 597409.1 | 1145502.1 | | | 1145503.1 | | | | |
| AD- | A- | csusaua(Ahd)GfgAfUfGfguuaccauaaL96 | 530 | A- | VPusUfsaugg(Tgn)aaccauCfcUfuauagsusc | 620 | GACUAUAAGGAUGGUUACCAUAG | 710 |
| 597410.1 | 1145504.1 | | | 1145505.1 | | | | |
| AD- | A- | gsasugg(Uhd)UfaCfCfAfuagaaacuuaL96 | 531 | A- | VPusAfsaguu(Tgn)cuauggUfaAfccaucscsu | 621 | AGGAUGGUUACCAUAGAAACUUC | 711 |
| 597417.1 | 1145518.1 | | | 1145519.1 | | | | |
| AD- | A- | ascsuac(Uhd)AfcAfGfAfgugcuaagcaL96 | 532 | A- | VPusGfscuua(Ggn)cacucuGfuAfguaguscsu | 622 | AGACUACUACAGAGUGCUAAGCU | 712 |
| 597443.1 | 1145570.1 | | | 1145571.1 | | | | |
| AD- | A- | usgscua(Ahd)GfcUfGfCfaugugucauaL96 | 533 | A- | VPusAfsugac(Agn)caugcaGfcUfuagcascsu | 623 | AGUGCUAAGCUGCAUGUGUCAUC | 713 |
| 597455.1 | 1145594.1 | | | 1145595.1 | | | | |
| AD- | A- | asasgcu(Ghd)CfaUfGfUfgucaucuuaaL96 | 534 | A- | VPusUfsaaga(Tgn)gacacaUfgCfagcuusasg | 624 | CUAAGCUGCAUGUGUCAUCUUAC | 714 |
| 597459.1 | 1145602.1 | | | 1145603.1 | | | | |
| AD- | A- | asgscug(Chd)AfuGfUfGfucaucuuacaL96 | 535 | A- | VPusGfsuaag(Agn)ugacacAfuGfcagcususa | 625 | UAAGCUGCAUGUGUCAUCUUACA | 715 |
| 597460.1 | 1145604.1 | | | 1145605.1 | | | | |
| AD- | A- | csasgua(Uhd)AfuUfUfCfaggaagguuaL96 | 536 | A- | VPusAfsaccu(Tgn)ccugaaAfuAfuacugsusu | 626 | AACAGUAUAUUUCAGGAAGGUUA | 716 |
| 597534.1 | 1145752.1 | | | 1145753.1 | | | | |
| AD- | A- | asasauc(Uhd)AfcCfUfAfaagcagcauaL96 | 537 | A- | VPusAfsugcu(Ggn)cuuuagGfuAfgauuusasa | 627 | UUAAAUCUACCUAAAGCAGCAUA | 717 |
| 597569.1 | 1145822.1 | | | 1145823.1 | | | | |
| AD- | A- | asgsucc(Uhd)AfgGfUfUfuauuuugcaaL96 | 538 | A- | VPusUfsgcaa(Agn)auaaacCfuAfggacusgsg | 628 | CCAGUCCUAGGUUUAUUUUGCAG | 718 |
| 597861.1 | 1146406.1 | | | 1146407.1 | | | | |
| AD- | A- | cscsuag(Ghd)UfuUfAfUfuuugcagacaL96 | 539 | A- | VPusGfsucug(Cgn)aaaauaAfaCfcuaggsasc | 629 | GUCCUAGGUUUAUUUUGCAGACU | 719 |
| 597864.1 | 1146412.1 | | | 1146413.1 | | | | |
| AD- | A- | cscsaag(Uhd)UfaUfUfCfagccucauaaL96 | 540 | A- | VPusUfsauga(Ggn)gcugaaUfaAfcuuggsgsa | 630 | UCCCAAGUUAUUCAGCCUCAUAU | 720 |
| 597894.1 | 1146472.1 | | | 1146473.1 | | | | |
| AD- | A- | gsusuau(Uhd)CfaGfCfCfucauaugacaL96 | 541 | A- | VPusGfsucau(Agn)ugaggcUfgAfauaacsusu | 631 | AAGUUAUUCAGCCUCAUAUGACU | 721 |
| 597898.1 | 1146480.1 | | | 1146481.1 | | | | |
| AD- | A- | ususauu(Chd)AfgCfCfUfcauaugacuaL96 | 542 | A- | VPusAfsguca(Tgn)augaggCfuGfaauaascsu | 632 | AGUUAUUCAGCCUCAUAUGACUC | 722 |
| 597899.1 | 1146482.1 | | | 1146483.1 | | | | |
| AD- | A- | usasuuc(Ahd)GfcCfUfCfauaugacucaL96 | 543 | A- | VPusGfsaguc(Agn)uaugagGfcUfgaauasasc | 633 | GUUAUUCAGCCUCAUAUGACUCC | 723 |
| 597900.1 | 1146484.1 | | | 1146485.1 | | | | |
| AD- | A- | uscsggc(Uhd)UfuAfCfCfaaaacaguuaL96 | 544 | A- | VPusAfsacug(Tgn)uuugguAfaAfgccgascsc | 634 | GGUCGGCUUUACCAAAACAGUUC | 724 |
| 597925.1 | 1146534.1 | | | 1146535.1 | | | | |
| AD- | A- | gsgscuu(Uhd)AfcCfAfAfaacaguucaaL96 | 545 | A- | VPusUfsgaac(Tgn)guuuugGfuAfaagccsgsa | 635 | UCGGCUUUACCAAAACAGUUCAG | 725 |
| 597927.1 | 1146538.1 | | | 1146539.1 | | | | |
| AD- | A- | asasaca(Ghd)UfuCfAfGfagugcacuuaL96 | 546 | A- | VPusAfsagug(Cgn)acucugAfaCfuguuususg | 636 | CAAAACAGUUCAGAGUGCACUUU | 726 |
| 597937.1 | 1146558.1 | | | 1146559.1 | | | | |
| AD- | A- | asgsagu(Ghd)CfaCfUfUfuggcacacaaL96 | 547 | A- | VPusUfsgugu(Ggn)ccaaagUfgCfacucusgsa | 637 | UCAGAGUGCACUUUGGCACACAA | 727 |
| 597946.1 | 1146576.1 | | | 1146577.1 | | | | |
| AD- | A- | asascag(Ahd)AfcAfAfUfcuaauguguaL96 | 548 | A- | VPusAfscaca(Tgn)uagauuGfuUfcuguuscsc | 638 | GGAACAGAACAAUCUAAUGUGUG | 728 |
| 597972.1 | 1146628.1 | | | 1146629.1 | | | | |
| AD- | A- | csasgaa(Chd)AfaUfCfUfaauguguggaL96 | 549 | A- | VPusCfscaca(Cgn)auuagaUfuGfuucugsusu | 639 | AACAGAACAAUCUAAUGUGUGGU | 729 |
| 597974.1 | 1146632.1 | | | 1146633.1 | | | | |
| AD- | A- | usasaug(Uhd)GfuGfGfUfuugguauucaL96 | 550 | A- | VPusGfsaaua(Cgn)caaaccAfcAfcauuasgsa | 640 | UCUAAUGUGUGGUUUGGUAUUCC | 730 |
| 597984.1 | 1146652.1 | | | 1146653.1 | | | | |
| AD- | A- | gsusgug(Ghd)UfuUfGfGfuauuccaagaL96 | 551 | A- | VPusCfsuugg(Agn)auaccaAfaCfcacacsasu | 641 | AUGUGUGGUUUGGUAUUCCAAGU | 731 |
| 597988.1 | 1146660.1 | | | 1146661.1 | | | | |
| AD- | A- | usgsugg(Uhd)UfuGfGfUfauuccaaguaL96 | 552 | A- | VPusAfscuug(Ggn)aauaccAfaAfccacascsa | 642 | UGUGUGGUUUGGUAUUCCAAGUG | 732 |
| 597989.1 | 1146662.1 | | | 1146663.1 | | | | |
| AD- | A- | asusgaaaGfgAfCfUfuucaaaggcaL96 | 913 | A- | VPusGfsccuUfuGfAfaaguCfcUfuucausgsa | 1005 | UCAUGAAAGGACUUUCAAAGGCC | 1097 |
| 464229.1 | 900784.1 | | | 900785.1 | | | | |
| AD- | A- | asasagagGfgUfGfUfucucuauguaL96 | 914 | A- | VPusAfscauAfgAfGfaacaCfcCfucuuususg | 1006 | CAAAAGAGGGUGUUCUCUAUGUA | 1098 |
| 464313.1 | 900952.1 | | | 900953.1 | | | | |
| AD- | A- | asasgaggGfuGfUfUfcucuauguaaL96 | 915 | A- | VPusUfsacaUfaGfAfgaacAfcCfcucuususu | 1007 | AAAAGAGGGUGUUCUCUAUGUAG | 1099 |
| 464314.1 | 900954.1 | | | 900955.1 | | | | |
| AD- | A- | usgsaggcUfuAfUfGfaaaugccuuaL96 | 916 | A- | VPusAfsaggCfaUfUfucauAfaGfccucasusu | 1008 | AAUGAGGCUUAUGAAAUGCCUUC | 1100 |
| 464559.1 | 901440.1 | | | 901441.1 | | | | |
| AD- | A- | asasggguAfuCfAfAfgacuacgaaaL96 | 917 | A- | VPusUfsucgUfaGfUfcuugAfuAfcccuuscsc | 1009 | GGAAGGGUAUCAAGACUACGAAC | 1101 |
| 464585.1 | 901492.1 | | | 901493.1 | | | | |
| AD- | A- | asgsgguaUfcAfAfGfacuacgaacaL96 | 918 | A- | VPusGfsuucGfuAfGfucuuGfaUfacccususc | 1010 | GAAGGGUAUCAAGACUACGAACC | 1102 |
| 464586.1 | 901494.1 | | | 901495.1 | | | | |
| AD- | A- | usasucaaGfaCfUfAfcgaaccugaaL96 | 919 | A- | VPusUfscagGfuUfCfguagUfcUfugauascsc | 1011 | GGUAUCAAGACUACGAACCUGAA | 1103 |
| 464590.1 | 901502.1 | | | 901503.1 | | | | |
| AD- | A- | uscsaagaCfuAfCfGfaaccugaagaL96 | 920 | A- | VPusCfsuucAfgGfUfucguAfgUfcuugasusa | 1012 | UAUCAAGACUACGAACCUGAAGC | 1104 |
| 464592.1 | 901506.1 | | | 901507.1 | | | | |
| AD- | A- | asasccugAfaGfCfCfuaagaaauaaL96 | 921 | A- | VPusUfsauuUfcUfUfaggcUfuCfagguuscsg | 1013 | CGAACCUGAAGCCUAAGAAAUAU | 1105 |
| 464603.1 | 901528.1 | | | 901529.1 | | | | |
| AD- | A- | csusgaagCfcUfAfAfgaaauaucuaL96 | 922 | A- | VPusAfsgauAfuUfUfcuuaGfgCfuucagsgsu | 1014 | ACCUGAAGCCUAAGAAAUAUCUU | 1106 |
| 464606.1 | 901534.1 | | | 901535.1 | | | | |
| AD- | A- | uscsccagUfuUfCfUfugagaucugaL96 | 923 | A- | VPusCfsagaUfcUfCfaagaAfaCfugggasgsc | 1015 | GCUCCCAGUUUCUUGAGAUCUGC | 1107 |
| 464630.1 | 901582.1 | | | 901583.1 | | | | |
| AD- | A- | asgsuuucUfuGfAfGfaucugcugaaL96 | 924 | A- | VPusUfscagCfaGfAfucucAfaGfaaacusgsg | 1016 | CCAGUUUCUUGAGAUCUGCUGAC | 1108 |
| 464634.1 | 901590.1 | | | 901591.1 | | | | |
| AD- | A- | ususucuuGfaGfAfUfcugcugacaaL96 | 925 | A- | VPusUfsgucAfgCfAfgaucUfcAfagaaascsu | 1017 | AGUUUCUUGAGAUCUGCUGACAG | 1109 |
| 464636.1 | 901594.1 | | | 901595.1 | | | | |
| AD- | A- | cscsagucAfuGfAfCfauuucucaaaL96 | 926 | A- | VPusUfsugaGfaAfAfugucAfuGfacuggsgsc | 1018 | GCCCAGUCAUGACAUUUCUCAAA | 1110 |
| 464694.1 | 901710.1 | | | 901711.1 | | | | |
| AD- | A- | csasucagCfaGfUfGfauugaaguaaL96 | 927 | A- | VPusUfsacuUfcAfAfucacUfgCfugaugsgsa | 1019 | UCCAUCAGCAGUGAUUGAAGUAU | 1111 |
| 464742.1 | 901806.1 | | | 901807.1 | | | | |
| AD- | A- | ususucacUfgAfAfGfugaauacauaL96 | 928 | A- | VPusAfsuguAfuUfCfacuuCfaGfugaaasgsg | 1020 | CCUUUCACUGAAGUGAAUACAUG | 1112 |
| 464778.1 | 901878.1 | | | 901879.1 | | | | |
| AD- | A- | ususcacuGfaAfGfUfgaauacaugaL96 | 929 | A- | VPusCfsaugUfaUfUfcacuUfcAfgugaasasg | 1021 | CUUUCACUGAAGUGAAUACAUGG | 1113 |
| 464779.1 | 901880.1 | | | 901881.1 | | | | |
| AD- | A- | ascsugaaGfuGfAfAfuacaugguaaL96 | 930 | A- | VPusUfsaccAfuGfUfauucAfcUfucagusgsa | 1022 | UCACUGAAGUGAAUACAUGGUAG | 1114 |
| 464782.1 | 901886.1 | | | 901887.1 | | | | |
| AD- | A- | ascscuaaGfuGfAfCfuaccacuuaaL96 | 931 | A- | VPusUfsaagUfgGfUfagucAfcUfuaggusgsu | 1023 | ACACCUAAGUGACUACCACUUAU | 1115 |
| 464813.1 | 901948.1 | | | 152515.1 | | | | |
| AD- | A- | gsusgacuAfcCfAfCfuuauuucuaaL96 | 932 | A- | VPusUfsagaAfaUfAfagugGfuAfgucacsusu | 1024 | AAGUGACUACCACUUAUUUCUAA | 1116 |
| 464814.1 | 901949.1 | | | 152519.1 | | | | |
| AD- | A- | usgsacuaCfcAfCfUfuauuucuaaaL96 | 933 | A- | VPusUfsuagAfaAfUfaaguGfgUfagucascsu | 1025 | AGUGACUACCACUUAUUUCUAAA | 1117 |
| 464815.1 | 901950.1 | | | 152535.1 | | | | |
| AD- | A- | asasacacCfuAfAfGfugacuaccaaL96 | 934 | A- | VPusUfsgguAfgUfCfacuuAfgGfuguuususu | 1026 | AAAAACACCUAAGUGACUACCAC | 1118 |
| 464856.1 | 902029.1 | | | 902030.1 | | | | |
| AD- | A- | csasccuaAfgUfGfAfcuaccacuuaL96 | 935 | A- | VPusAfsaguGfgUfAfgucaCfuUfaggugsusu | 1027 | AACACCUAAGUGACUACCACUUA | 1119 |
| 464859.1 | 902035.1 | | | 902036.1 | | | | |
| AD- | A- | csusguugUfuCfAfGfaaguuguuaaL96 | 936 | A- | VPusUfsaacAfaCfUfucugAfaCfaacagscsa | 1028 | UGCUGUUGUUCAGAAGUUGUUAG | 1120 |
| 464884.1 | 902085.1 | | | 902086.1 | | | | |
| AD- | A- | usgsuuguUfcAfGfAfaguuguuagaL96 | 937 | A- | VPusCfsuaaCfaAfCfuucuGfaAfcaacasgsc | 1029 | GCUGUUGUUCAGAAGUUGUUAGU | 1121 |
| 464885.1 | 902087.1 | | | 902088.1 | | | | |
| AD- | A- | gsusuguuCfaGfAfAfguuguuaguaL96 | 938 | A- | VPusAfscuaAfcAfAfcuucUfgAfacaacsasg | 1030 | CUGUUGUUCAGAAGUUGUUAGUG | 1122 |
| 464886.1 | 902089.1 | | | 902090.1 | | | | |
| AD- | A- | ususuuaaUfgAfUfAfcugucuaagaL96 | 939 | A- | VPusCfsuuaGfaCfAfguauCfaUfuaaaasgsa | 1031 | UCUUUUAAUGAUACUGUCUAAGA | 1123 |
| 464928.1 | 902173.1 | | | 902174.1 | | | | |
| AD- | A- | asusacugUfcUfAfAfgaauaaugaaL96 | 940 | A- | VPusUfscauUfaUfUfcuuaGfaCfaguauscsa | 1032 | UGAUACUGUCUAAGAAUAAUGAC | 1124 |
| 464936.1 | 902189.1 | | | 902190.1 | | | | |
| AD- | A- | asgscaugAfaAfCfUfaugcaccuaaL96 | 941 | A- | VPusUfsaggUfgCfAfuaguUfuCfaugcuscsa | 1033 | UGAGCAUGAAACUAUGCACCUAU | 1125 |
| 464977.1 | 902268.1 | | | 902269.1 | | | | |
| AD- | A- | csasugaaAfcUfAfUfgcaccuauaaL96 | 942 | A- | VPusUfsauaGfgUfGfcauaGfuUfucaugscsu | 1034 | AGCAUGAAACUAUGCACCUAUAA | 1126 |
| 464978.1 | 902270.1 | | | 902271.1 | | | | |
| AD- | A- | ususuaucCfcAfUfCfucacuuuaaaL96 | 943 | A- | VPusUfsuaaAfgUfGfagauGfgGfauaaasasa | 1035 | UUUUUAUCCCAUCUCACUUUAAU | 1127 |
| 465064.1 | 902441.1 | | | 902442.1 | | | | |
| AD- | A- | ususauccCfaUfCfUfcacuuuaauaL96 | 944 | A- | VPusAfsuuaAfaGfUfgagaUfgGfgauaasasa | 1036 | UUUUAUCCCAUCUCACUUUAAUA | 1128 |
| 465065.1 | 902443.1 | | | 902444.1 | | | | |
| AD- | A- | uscsccauCfuCfAfCfuuuaauaauaL96 | 945 | A- | VPusAfsuuaUfuAfAfagugAfgAfugggasusa | 1037 | UAUCCCAUCUCACUUUAAUAAUA | 1129 |
| 465068.1 | 902449.1 | | | 902450.1 | | | | |
| AD- | A- | asasaaugGfaAfCfAfuuaacccuaaL96 | 946 | A- | VPusUfsaggGfuUfAfauguUfcCfauuuuscsu | 1038 | AGAAAAUGGAACAUUAACCCUAC | 1130 |
| 465168.1 | 902649.1 | | | 902650.1 | | | | |
| AD- | A- | uscsucuuUfcAfGfGfgaagaucuaaL96 | 947 | A- | VPusUfsagaUfcUfUfcccuGfaAfagagasasa | 1039 | UUUCUCUUUCAGGGAAGAUCUAU | 1131 |
| 465691.1 | 903695.1 | | | 903696.1 | | | | |
| AD- | A- | asasgucaCfuAfGfUfagaaaguauaL96 | 948 | A- | VPusAfsuacUfuUfCfuacuAfgUfgacuususu | 1040 | AAAAGUCACUAGUAGAAAGUAUA | 1132 |
| 465756.1 | 903825.1 | | | 903826.1 | | | | |
| AD- | A- | asgsucacUfaGfUfAfgaaaguauaaL96 | 949 | A- | VPusUfsauaCfuUfUfcuacUfaGfugacususu | 1041 | AAAGUCACUAGUAGAAAGUAUAA | 1133 |
| 465757.1 | 903827.1 | | | 903828.1 | | | | |
| AD- | A- | csascuagUfaGfAfAfaguauaauuaL96 | 950 | A- | VPusAfsauuAfuAfCfuuucUfaCfuagugsasc | 1042 | GUCACUAGUAGAAAGUAUAAUUU | 1134 |
| 465760.1 | 903833.1 | | | 903834.1 | | | | |
| AD- | A- | csasgaauAfuUfCfUfagacaugcuaL96 | 951 | A- | VPusAfsgcaUfgUfCfuagaAfuAfuucugsusc | 1043 | GACAGAAUAUUCUAGACAUGCUA | 1135 |
| 465784.1 | 903881.1 | | | 903882.1 | | | | |
| AD- | A- | asgsaauaUfuCfUfAfgacaugcuaaL96 | 952 | A- | VPusUfsagcAfuGfUfcuagAfaUfauucusgsu | 1044 | ACAGAAUAUUCUAGACAUGCUAG | 1136 |
| 465785.1 | 903883.1 | | | 903884.1 | | | | |
| AD- | A- | usasgacaUfgCfUfAfgcaguuuauaL96 | 953 | A- | VPusAfsuaaAfcUfGfcuagCfaUfgucuasgsa | 1045 | UCUAGACAUGCUAGCAGUUUAUA | 1137 |
| 465794.1 | 903901.1 | | | 903902.1 | | | | |
| AD- | A- | gsasugguUfaCfCfAfuagaaacuuaL96 | 954 | A- | VPusAfsaguUfuCfUfauggUfaAfccaucscsu | 1046 | AGGAUGGUUACCAUAGAAACUUC | 1138 |
| 465876.1 | 904065.1 | | | 904066.1 | | | | |
| AD- | A- | asasgcugCfaUfGfUfgucaucuuaaL96 | 955 | A- | VPusUfsaagAfuGfAfcacaUfgCfagcuusasg | 1047 | CUAAGCUGCAUGUGUCAUCUUAC | 1139 |
| 465918.1 | 904149.1 | | | 904150.1 | | | | |
| AD- | A- | asgscugcAfuGfUfGfucaucuuacaL96 | 956 | A- | VPusGfsuaaGfaUfGfacacAfuGfcagcususa | 1048 | UAAGCUGCAUGUGUCAUCUUACA | 1140 |
| 465919.1 | 904151.1 | | | 904152.1 | | | | |
| AD- | A- | asgsuccuAfgGfUfUfuauuuugcaaL96 | 957 | A- | VPusUfsgcaAfaAfUfaaacCfuAfggacusgsg | 1049 | CCAGUCCUAGGUUUAUUUUGCAG | 1141 |
| 466320.1 | 904953.1 | | | 904954.1 | | | | |
| AD- | A- | uscsggcuUfuAfCfCfaaaacaguuaL96 | 958 | A- | VPusAfsacuGfuUfUfugguAfaAfgccgascsc | 1050 | GGUCGGCUUUACCAAAACAGUUC | 1142 |
| 466384.1 | 905081.1 | | | 905082.1 | | | | |
| AD- | A- | gsgscuuuAfcCfAfAfaacaguucaaL96 | 959 | A- | VPusUfsgaaCfuGfUfuuugGfuAfaagccsgsa | 1051 | UCGGCUUUACCAAAACAGUUCAG | 1143 |
| 466386.1 | 905085.1 | | | 905086.1 | | | | |
| AD- | A- | usasauguGfuGfGfUfuugguauucaL96 | 960 | A- | VPusGfsaauAfcCfAfaaccAfcAfcauuasgsa | 1052 | UCUAAUGUGUGGUUUGGUAUUCC | 1144 |
| 466443.1 | 905199.1 | | | 905200.1 | | | | |
| AD- | A- | asusacauCfuUfUfAfgccauggauaL96 | 961 | A- | VPusAfsuccAfuGfGfcuaaAfgAfuguaususu | 1053 | AAAUACAUCUUUAGCCAUGGAUG | 1145 |
| 475646.1 | 919481.1 | | | 919482.1 | | | | |
| AD- | A- | gsgsauguGfuUfCfAfugaaaggacaL96 | 962 | A- | VPusGfsuccUfuUfCfaugaAfcAfcauccsasu | 1054 | AUGGAUGUGUUCAUGAAAGGACU | 1146 |
| 475661.1 | 919511.1 | | | 919512.1 | | | | |
| AD- | A- | asusguguUfcAfUfGfaaaggacuuaL96 | 963 | A- | VPusAfsaguCfcUfUfucauGfaAfcacauscsc | 1055 | GGAUGUGUUCAUGAAAGGACUUU | 1147 |
| 475663.1 | 919515.1 | | | 919516.1 | | | | |
| AD- | A- | usgsuucaUfgAfAfAfggacuuucaaL96 | 964 | A- | VPusUfsgaaAfgUfCfcuuuCfaUfgaacascsa | 1056 | UGUGUUCAUGAAAGGACUUUCAA | 1148 |
| 475666.1 | 919521.1 | | | 919522.1 | | | | |
| AD- | A- | gsasguccUfcUfAfUfguagguuccaL96 | 965 | A- | VPusGfsgaaCfcUfAfcauaGfaGfgacucscsc | 1057 | GGGAGUCCUCUAUGUAGGUUCCA | 1149 |
| 475723.1 | 919635.1 | | | 919636.1 | | | | |
| AD- | A- | csuscuauGfuAfGfGfuuccaaaacaL96 | 966 | A- | VPusGfsuuuUfgGfAfaccuAfcAfuagagsgsa | 1058 | UCCUCUAUGUAGGUUCCAAAACU | 1150 |
| 475728.1 | 919645.1 | | | 919646.1 | | | | |
| AD- | A- | usgsguucAfuGfGfAfgugacaacaaL96 | 967 | A- | VPusUfsguuGfuCfAfcuccAfuGfaaccascsu | 1059 | AGUGGUUCAUGGAGUGACAACAG | 1151 |
| 475761.1 | 919709.1 | | | 919710.1 | | | | |
| AD- | A- | uscsauggAfgUfGfAfcaacaguggaL96 | 968 | A- | VPusCfscacUfgUfUfgucaCfuCfcaugasasc | 1060 | GUUCAUGGAGUGACAACAGUGGC | 1152 |
| 475765.1 | 919717.1 | | | 919718.1 | | | | |
| AD- | A- | usgsaggcUfuAfUfGfaaaugccuuaL96 | 969 | A- | VPusAfsaggCfaUfUfucauAfaGfccucascsu | 1061 | AAUGAGGCUUAUGAAAUGCCUUC | 3601 |
| 475888.1 | 901440.1 | | | 919961.1 | | | | |
| AD- | A- | gsgsaaucCfuGfGfAfagacaugccaL96 | 970 | A- | VPusGfsgcaUfgUfCfuuccAfgGfauuccsusu | 1062 | AAGGAAUCCUGGAAGACAUGCCU | 1153 |
| 475895.1 | 919973.1 | | | 919974.1 | | | | |
| AD- | A- | asgsugagGfcUfUfAfugaaaugccaL96 | 971 | A- | VPusGfsgcaUfuUfCfauaaGfcCfucacusgsc | 1063 | GCAGUGAGGCUUAUGAAAUGCCU | 1154 |
| 475927.1 | 920037.1 | | | 920038.1 | | | | |
| AD- | A- | asgsgcuuAfuGfAfAfaugccuucaaL96 | 972 | A- | VPusUfsgaaGfgCfAfuuucAfuAfagccuscsa | 1064 | UGAGGCUUAUGAAAUGCCUUCAG | 1155 |
| 475929.1 | 920041.1 | | | 920042.1 | | | | |
| AD- | A- | gsgscuuaUfgAfAfAfugccuucagaL96 | 973 | A- | VPusCfsugaAfgGfCfauuuCfaUfaagccsusc | 1065 | GAGGCUUAUGAAAUGCCUUCAGA | 1156 |
| 475930.1 | 920043.1 | | | 920044.1 | | | | |
| AD- | A- | asusgccuUfcAfGfAfggaaggcuaaL96 | 974 | A- | VPusUfsagcCfuUfCfcucuGfaAfggcaususu | 1066 | AAAUGCCUUCAGAGGAAGGCUAC | 1157 |
| 475941.1 | 920064.1 | | | 920065.1 | | | | |
| AD- | A- | usgsccuuCfaGfAfGfgaaggcuacaL96 | 975 | A- | VPusGfsuagCfcUfUfccucUfgAfaggcasusu | 1067 | AAUGCCUUCAGAGGAAGGCUACC | 1158 |
| 475942.1 | 920066.1 | | | 920067.1 | | | | |
| AD- | A- | gsgsaaggCfuAfCfCfaagacuaugaL96 | 976 | A- | VPusCfsauaGfuCfUfugguAfgCfcuuccsusc | 1068 | GAGGAAGGCUACCAAGACUAUGA | 1159 |
| 475952.1 | 920086.1 | | | 920087.1 | | | | |
| AD- | A- | gsasaggcUfaCfCfAfagacuaugaaL96 | 977 | A- | VPusUfscauAfgUfCfuuggUfaGfccuucscsu | 1069 | AGGAAGGCUACCAAGACUAUGAG | 1160 |
| 475953.1 | 920088.1 | | | 920089.1 | | | | |
| AD- | A- | asasggcuAfcCfAfAfgacuaugagaL96 | 978 | A- | VPusCfsucaUfaGfUfcuugGfuAfgccuuscsc | 1070 | GGAAGGCUACCAAGACUAUGAGC | 1161 |
| 475954.1 | 920090.1 | | | 920091.1 | | | | |
| AD- | A- | asgsgcuaCfcAfAfGfacuaugagcaL96 | 979 | A- | VPusGfscucAfuAfGfucuuGfgUfagccususc | 1071 | GAAGGCUACCAAGACUAUGAGCC | 1162 |
| 475955.1 | 920092.1 | | | 920093.1 | | | | |
| AD- | A- | ascsuaugAfgCfCfUfgaagccuaaaL96 | 980 | A- | VPusUfsuagGfcUfUfcaggCfuCfauaguscsu | 1072 | AGACUAUGAGCCUGAAGCCUAAG | 1163 |
| 475966.1 | 920114.1 | | | 920115.1 | | | | |
| AD- | A- | gscsucuuCfcAfUfGfgcguacaagaL96 | 981 | A- | VPusCfsuugUfaCfGfccauGfgAfagagcsasg | 1073 | CUGCUCUUCCAUGGCGUACAAGU | 1164 |
| 476025.1 | 920230.1 | | | 920231.1 | | | | |
| AD- | A- | csuscuucCfaUfGfGfcguacaaguaL96 | 982 | A- | VPusAfscuuGfuAfCfgccaUfgGfaagagscsa | 1074 | UGCUCUUCCAUGGCGUACAAGUG | 1165 |
| 476026.1 | 920232.1 | | | 920233.1 | | | | |
| AD- | A- | uscsuuccAfuGfGfCfguacaagugaL96 | 983 | A- | VPusCfsacuUfgUfAfcgccAfuGfgaagasgsc | 1075 | GCUCUUCCAUGGCGUACAAGUGC | 1166 |
| 476027.1 | 920234.1 | | | 920235.1 | | | | |
| AD- | A- | ususccauGfgCfGfUfacaagugcuaL96 | 984 | A- | VPusAfsgcaCfuUfGfuacgCfcAfuggaasgsa | 1076 | UCUUCCAUGGCGUACAAGUGCUC | 1167 |
| 476029.1 | 920238.1 | | | 920239.1 | | | | |
| AD- | A- | uscscaugGfcGfUfAfcaagugcucaL96 | 985 | A- | VPusGfsagcAfcUfUfguacGfcCfauggasasg | 1077 | CUUCCAUGGCGUACAAGUGCUCA | 1168 |
| 476030.1 | 920240.1 | | | 920241.1 | | | | |
| AD- | A- | csasuggcGfuAfCfAfagugcucagaL96 | 986 | A- | VPusCfsugaGfcAfCfuuguAfcGfccaugsgsa | 1078 | UCCAUGGCGUACAAGUGCUCAGU | 1169 |
| 476032.1 | 920244.1 | | | 920245.1 | | | | |
| AD- | A- | usgsugccCfaGfUfCfaugaccuuuaL96 | 987 | A- | VPusAfsaagGfuCfAfugacUfgGfgcacasusu | 1079 | AAUGUGCCCAGUCAUGACCUUUU | 1170 |
| 476041.1 | 920262.1 | | | 920263.1 | | | | |
| AD- | A- | ascscuuuUfcUfCfAfaagcuguacaL96 | 988 | A- | VPusGfsuacAfgCfUfuugaGfaAfaagguscsa | 1080 | UGACCUUUUCUCAAAGCUGUACA | 1171 |
| 476058.1 | 920291.1 | | | 920292.1 | | | | |
| AD- | A- | ususuucuCfaAfAfGfcuguacaguaL96 | 989 | A- | VPusAfscugUfaCfAfgcuuUfgAfgaaaasgsg | 1081 | CCUUUUCUCAAAGCUGUACAGUG | 1172 |
| 476061.1 | 920297.1 | | | 920298.1 | | | | |
| AD- | A- | uscsuuccAfuCfAfGfcagugaucgaL96 | 990 | A- | VPusCfsgauCfaCfUfgcugAfuGfgaagascsu | 1082 | AGUCUUCCAUCAGCAGUGAUCGG | 1173 |
| 476089.1 | 920353.1 | | | 920354.1 | | | | |
| AD- | A- | csusguggAfuAfUfUfguuguggcuaL96 | 991 | A- | VPusAfsgccAfcAfAfcaauAfuCfcacagscsa | 1083 | UGCUGUGGAUAUUGUUGUGGCUU | 1174 |
| 476146.1 | 920466.1 | | | 920467.1 | | | | |
| AD- | A- | asasaacaCfcUfAfAfgugacuaccaL96 | 992 | A- | VPusGfsguaGfuCfAfcuuaGfgUfguuuusasa | 1084 | UAAAAACACCUAAGUGACUACCA | |
| 476152.1 | 902027.1 | | | 920475.1 | | | | |
| AD- | A- | gsasaacuUfaAfAfAfcaccuaaguaL96 | 993 | A- | VPusAfscuuAfgGfUfguuuUfaAfguuuscusu | 1085 | AAGAAACUUAAAACACCUAAGUG | 1175 |
| 476192.1 | 920548.1 | | | 920549.1 | | | | |
| AD- | A- | usasaaacAfcCfUfAfagugacuacaL96 | 994 | A- | VPusGfsuagUfcAfCfuuagGfuGfuuuuasasg | 1086 | CUUAAAACACCUAAGUGACUACC | 1176 |
| 476198.1 | 920560.1 | | | 920561.1 | | | | |
| AD- | A- | asusuaugUfgAfGfCfaugagacuaaL96 | 995 | A- | VPusUfsaguCfuCfAfugcuCfaCfauaaususu | 1087 | AAAUUAUGUGAGCAUGAGACUAU | 1177 |
| 476306.1 | 920771.1 | | | 920772.1 | | | | |
| AD- | A- | asusgugaGfcAfUfGfagacuaugcaL96 | 996 | A- | VPusGfscauAfgUfCfucauGfcUfcacausasa | 1088 | UUAUGUGAGCAUGAGACUAUGCA | 1178 |
| 476309.1 | 920777.1 | | | 920778.1 | | | | |
| AD- | A- | gsusgagcAfuGfAfGfacuaugcacaL96 | 997 | A- | VPusGfsugcAfuAfGfucucAfuGfcucacsasu | 1089 | AUGUGAGCAUGAGACUAUGCACC | 1179 |
| 476311.1 | 920781.1 | | | 920782.1 | | | | |
| AD- | A- | usgsagcaUfgAfGfAfcuaugcaccaL96 | 998 | A- | VPusGfsgugCfaUfAfgucuCfaUfgcucascsa | 1090 | UGUGAGCAUGAGACUAUGCACCU | 1180 |
| 476312.1 | 920783.1 | | | 920784.1 | | | | |
| AD- | A- | gsasgcauGfaGfAfCfuaugcaccuaL96 | 999 | A- | VPusAfsgguGfcAfUfagucUfcAfugcucsasc | 1091 | GUGAGCAUGAGACUAUGCACCUA | 1181 |
| 476313.1 | 920785.1 | | | 920786.1 | | | | |
| AD- | A- | asgscaugAfgAfCfUfaugcaccuaaL96 | 1000 | A- | VPusUfsaggUfgCfAfuaguCfuCfaugcuscsa | 1092 | UGAGCAUGAGACUAUGCACCUAU | 1182 |
| 476316.1 | 920789.1 | | | 920790.1 | | | | |
| AD- | A- | gscsaugaGfaCfUfAfugcaccuauaL96 | 1001 | A- | VPusAfsuagGfuGfCfauagUfcUfcaugcsusc | 1093 | GAGCAUGAGACUAUGCACCUAUA | 1183 |
| 476317.1 | 920791.1 | | | 920792.1 | | | | |
| AD- | A- | usgsagacUfaUfGfCfaccuauaaaaL96 | 1002 | A- | VPusUfsuuaUfaGfGfugcaUfaGfucucasusg | 1094 | CAUGAGACUAUGCACCUAUAAAU | 1184 |
| 476320.1 | 920797.1 | | | 920798.1 | | | | |
| AD- | A- | gsasgacuAfuGfCfAfccuauaaauaL96 | 1003 | A- | VPusAfsuuuAfuAfGfgugcAfuAfgucucsasu | 1095 | AUGAGACUAUGCACCUAUAAAUA | 1185 |
| 476321.1 | 920799.1 | | | 920800.1 | | | | |
| AD- | A- | asusguguUfuUfAfUfuaacuugugaL96 | 1004 | A- | VPusCfsacaAfgUfUfaauaAfaAfcacauscsa | 1096 | UGAUGUGUUUUAUUAACUUGUGU | 1186 |
| 476344.1 | 920845.1 | | | 920846.1 | | | | |
| AD- | A- | csasuga(Ahd)AfgGfAfCfuuucaaaggaL96 | 1371 | A- | VPusCfscuuu(Ggn)aaagucCfuUfucaugsasa | 1460 | UUCAUGAAAGGACUUUCAAAGGC | 1549 |
| 595768.1 | 1142220.1 | | | 1142221.1 | | | | |
| AD- | A- | asusgaa(Ahd)GfgAfCfUfuucaaaggcaL96 | 1372 | A- | VPusGfsccuu(Tgn)gaaaguCfcUfuucausgsa | 1461 | UCAUGAAAGGACUUUCAAAGGCC | 1550 |
| 595769.2 | 1142222.1 | | | 1142223.1 | | | | |
| AD- | A- | usgsaaa(Ghd)GfaCfUfUfucaaaggccaL96 | 1373 | A- | VPusGfsgccu(Tgn)ugaaagUfcCfuuucasusg | 1462 | CAUGAAAGGACUUUCAAAGGCCA | 1551 |
| 595770.1 | 1142224.1 | | | 1142225.1 | | | | |
| AD- | A- | gsasaag(Ghd)AfcUfUfUfcaaaggccaaL96 | 1374 | A- | VPusUfsggcc(Tgn)uugaaaGfuCfcuuucsasu | 1463 | AUGAAAGGACUUUCAAAGGCCAA | 1552 |
| 595771.1 | 1142226.1 | | | 1142227.1 | | | | |
| AD- | A- | asasagg(Ahd)CfuUfUfCfaaaggccaaaL96 | 1375 | A- | VPusUfsuggc(Cgn)uuugaaAfgUfccuuuscsa | 1464 | UGAAAGGACUUUCAAAGGCCAAG | 1553 |
| 595772.1 | 1142228.1 | | | 1142229.1 | | | | |
| AD- | A- | asasgga(Chd)UfuUfCfAfaaggccaagaL96 | 1376 | A- | VPusCfsuugg(Cgn)cuuugaAfaGfuccuususc | 1465 | GAAAGGACUUUCAAAGGCCAAGG | 1554 |
| 595773.1 | 1142230.1 | | | 1142231.1 | | | | |
| AD- | A- | asgsgac(Uhd)UfuCfAfAfaggccaaggaL96 | 1377 | A- | VPusCfscuug(Ggn)ccuuugAfaAfguccususu | 1466 | AAAGGACUUUCAAAGGCCAAGGA | 1555 |
| 595774.1 | 1142232.1 | | | 1142233.1 | | | | |
| AD- | A- | asasgac(Chd)AfaAfGfAfgcaagugacaL96 | 1378 | A- | VPusGfsucac(Tgn)ugcucuUfuGfgucuuscsu | 1467 | AGAAGACCAAAGAGCAAGUGACA | 1556 |
| 595926.2 | 1142536.1 | | | 1142537.1 | | | | |
| AD- | A- | asasgag(Chd)AfaGfUfGfacaaauguuaL96 | 1379 | A- | VPusAfsacau(Tgn)ugucacUfuGfcucuususg | 1468 | CAAAGAGCAAGUGACAAAUGUUG | 1557 |
| 595933.1 | 1142550.1 | | | 1142551.1 | | | | |
| AD- | A- | gsasgca(Ahd)GfuGfAfCfaaauguuggaL96 | 1380 | A- | VPusCfscaac(Agn)uuugucAfcUfugcucsusu | 1469 | AAGAGCAAGUGACAAAUGUUGGA | 1558 |
| 595935.1 | 1142554.1 | | | 1142555.1 | | | | |
| AD- | A- | asgscaa(Ghd)UfgAfCfAfaauguuggaaL96 | 1381 | A- | VPusUfsccaa(Cgn)auuuguCfaCfuugcuscsu | 1470 | AGAGCAAGUGACAAAUGUUGGAG | 1559 |
| 595936.1 | 1142556.1 | | | 1142557.1 | | | | |
| AD- | A- | gscsaag(Uhd)GfaCfAfAfauguuggagaL96 | 1382 | A- | VPusCfsucca(Agn)cauuugUfcAfcuugcsusc | 1471 | GAGCAAGUGACAAAUGUUGGAGG | 1560 |
| 595937.1 | 1142558.1 | | | 1142559.1 | | | | |
| AD- | A- | csasagu(Ghd)AfcAfAfAfuguuggaggaL96 | 1383 | A- | VPusCfscucc(Agn)acauuuGfuCfacuugscsu | 1472 | AGCAAGUGACAAAUGUUGGAGGA | 1561 |
| 595938.1 | 1142560.1 | | | 1142561.1 | | | | |
| AD- | A- | asasuga(Ghd)GfcUfUfAfugaaaugccaL96 | 1384 | A- | VPusGfsgcau(Tgn)ucauaaGfcCfucauusgsu | 1473 | ACAAUGAGGCUUAUGAAAUGCCU | 1562 |
| 596098.1 | 1142880.1 | | | 1142881.1 | | | | |
| AD- | A- | asusgag(Ghd)CfuUfAfUfgaaaugccuaL96 | 1385 | A- | VPusAfsggca(Tgn)uucauaAfgCfcucaususg | 1474 | CAAUGAGGCUUAUGAAAUGCCUU | 1563 |
| 596099.1 | 1142882.1 | | | 1142883.1 | | | | |
| AD- | A- | usgsagg(Chd)UfuAfUfGfaaaugccuuaL96 | 1386 | A- | VPusAfsaggc(Agn)uuucauAfaGfccucasusu | 1475 | AAUGAGGCUUAUGAAAUGCCUUC | 1564 |
| 596100.2 | 1142884.1 | | | 1142885.1 | | | | |
| AD- | A- | gsasggc(Uhd)UfaUfGfAfaaugccuucaL96 | 1387 | A- | VPusGfsaagg(Cgn)auuucaUfaAfgccucsasu | 1476 | AUGAGGCUUAUGAAAUGCCUUCU | 1565 |
| 596101.1 | 1142886.1 | | | 1142887.1 | | | | |
| AD- | A- | asgsugc(Uhd)CfaGfUfUfccaaugugcaL96 | 1388 | A- | VPusGfscaca(Tgn)uggaacUfgAfgcacususg | 1477 | CAAGUGCUCAGUUCCAAUGUGCC | 1566 |
| 596215.2 | 1143114.1 | | | 1143115.1 | | | | |
| AD- | A- | usgscuc(Ahd)GfuUfCfCfaaugugcccaL96 | 1389 | A- | VPusGfsggca(Cgn)auuggaAfcUfgagcascsu | 1478 | AGUGCUCAGUUCCAAUGUGCCCA | 1567 |
| 596217.1 | 1143118.1 | | | 1143119.1 | | | | |
| AD- | A- | asgsucu(Uhd)CfcAfUfCfagcagugauaL96 | 1390 | A- | VPusAfsucac(Tgn)gcugauGfgAfagacususc | 1479 | GAAGUCUUCCAUCAGCAGUGAUU | 1568 |
| 596276.1 | 1143236.1 | | | 1143237.1 | | | | |
| AD- | A- | gsasagu(Ghd)AfaUfAfCfaugguagcaaL96 | 1391 | A- | VPusUfsgcua(Cgn)cauguaUfuCfacuucsasg | 1480 | CUGAAGUGAAUACAUGGUAGCAG | 1569 |
| 596326.2 | 1143336.1 | | | 1143337.1 | | | | |
| AD- | A- | asgsuga(Ahd)UfaCfAfUfgguagcaggaL96 | 1392 | A- | VPusCfscugc(Tgn)accaugUfaUfucacususc | 1481 | GAAGUGAAUACAUGGUAGCAGGG | 1570 |
| 596328.1 | 1143340.1 | | | 1143341.1 | | | | |
| AD- | A- | asasaaa(Chd)AfcCfUfAfagugacuacaL96 | 1393 | A- | VPusGfsuagu(Cgn)acuuagGfuGfuuuuusasa | 1482 | UUAAAAACACCUAAGUGACUACC | 1571 |
| 596390.2 | 1143464.1 | | | 1143465.1 | | | | |
| AD- | A- | asasaac(Ahd)CfcUfAfAfgugacuaccaL96 | 1394 | A- | VPusGfsguag(Tgn)cacuuaGfgUfguuuususa | 1483 | UAAAAACACCUAAGUGACUACCA | 1572 |
| 596391.2 | 1143466.1 | | | 1143467.1 | | | | |
| AD- | A- | asasaca(Chd)CfuAfAfGfugacuaccaaL96 | 1395 | A- | VPusUfsggua(Ggn)ucacuuAfgGfuguuususu | 1484 | AAAAACACCUAAGUGACUACCAC | 1573 |
| 596392.2 | 1143468.1 | | | 1143469.1 | | | | |
| AD- | A- | asascac(Chd)UfaAfGfUfgacuaccacaL96 | 1396 | A- | VPusGfsuggu(Agn)gucacuUfaGfguguususu | 1485 | AAAACACCUAAGUGACUACCACU | 1574 |
| 596393.1 | 1143470.1 | | | 1143471.1 | | | | |
| AD- | A- | ascsacc(Uhd)AfaGfUfGfacuaccacuaL96 | 1397 | A- | VPusAfsgugg(Tgn)agucacUfuAfggugususu | 1486 | AAACACCUAAGUGACUACCACUU | 1575 |
| 596394.1 | 1143472.1 | | | 1143473.1 | | | | |
| AD- | A- | csasccu(Ahd)AfgUfGfAfcuaccacuuaL96 | 1398 | A- | VPusAfsagug(Ggn)uagucaCfuUfaggugsusu | 1487 | AACACCUAAGUGACUACCACUUA | 1576 |
| 596395.1 | 1143474.1 | | | 1143475.1 | | | | |
| AD- | A- | ascscua(Ahd)GfuGfAfCfuaccacuuaaL96 | 1399 | A- | VPusUfsaagu(Ggn)guagucAfcUfuaggusgsu | 1488 | ACACCUAAGUGACUACCACUUAU | 1577 |
| 596396.2 | 1143476.1 | | | 1143477.1 | | | | |
| AD- | A- | cscsuaa(Ghd)UfgAfCfUfaccacuuauaL96 | 1400 | A- | VPusAfsuaag(Tgn)gguaguCfaCfuuaggsusg | 1489 | CACCUAAGUGACUACCACUUAUU | 1578 |
| 596397.1 | 1143478.1 | | | 1143479.1 | | | | |
| AD- | A- | csusaag(Uhd)GfaCfUfAfccacuuauuaL96 | 1401 | A- | VPusAfsauaa(Ggn)ugguagUfcAfcuuagsgsu | 1490 | ACCUAAGUGACUACCACUUAUUU | 1579 |
| 596398.1 | 1143480.1 | | | 1143481.1 | | | | |
| AD- | A- | asgsuga(Chd)UfaCfCfAfcuuauuucuaL96 | 1402 | A- | VPusAfsgaaa(Tgn)aaguggUfaGfucacususa | 1491 | UAAGUGACUACCACUUAUUUCUA | 1580 |
| 596401.1 | 1143486.1 | | | 1143487.1 | | | | |
| AD- | A- | gsusgac(Uhd)AfcCfAfCfuuauuucuaaL96 | 1403 | A- | VPusUfsagaa(Agn)uaagugGfuAfgucacsusu | 1492 | AAGUGACUACCACUUAUUUCUAA | 1581 |
| 596402.2 | 1143488.1 | | | 1143489.1 | | | | |
| AD- | A- | usgsacu(Ahd)CfcAfCfUfuauuucuaaaL96 | 1404 | A- | VPusUfsuaga(Agn)auaaguGfgUfagucascsu | 1493 | AGUGACUACCACUUAUUUCUAAA | 1582 |
| 596403.1 | 1143490.1 | | | 1143491.1 | | | | |
| AD- | A- | asasacu(Ahd)UfgCfAfCfcuauaaauaaL96 | 1405 | A- | VPusUfsauuu(Agn)uaggugCfaUfaguuuscsa | 1494 | UGAAACUAUGCACCUAUAAAUAC | 1583 |
| 596521.1 | 1143726.1 | | | 1143727.1 | | | | |
| AD- | A- | ususgug(Uhd)UfuGfUfAfuauaaauggaL96 | 1406 | A- | VPusCfscauu(Tgn)auauacAfaAfcacaasgsu | 1495 | ACUUGUGUUUGUAUAUAAAUGGU | 1584 |
| 596564.1 | 1143812.1 | | | 1143813.1 | | | | |
| AD- | A- | csasuga(Ahd)AfgGfAfCfuuucaaaggaL96 | 1407 | A- | VPusCfscuuUfgAfAfagucCfuUfucaugsasa | 1496 | UUCAUGAAAGGACUUUCAAAGGC | 1585 |
| 689314.1 | 1142220.1 | | | 900783.1 | | | | |
| AD- | A- | asusgaa(Ahd)GfgAfCfUfuucaaaggcaL96 | 1408 | A- | VPusGfsccuUfuGfAfaaguCfcUfuucausgsa | 1497 | UCAUGAAAGGACUUUCAAAGGCC | 1586 |
| 689315.1 | 1142222.1 | | | 900785.1 | | | | |
| AD- | A- | usgsaaa(Ghd)GfaCfUfUfucaaaggccaL96 | 1409 | A- | VPusGfsgccUfuUfGfaaagUfcCfuuucasusg | 1498 | CAUGAAAGGACUUUCAAAGGCCA | 1587 |
| 689316.1 | 1142224.1 | | | 900787.1 | | | | |
| AD- | A- | gsasaag(Ghd)AfcUfUfUfcaaaggccaaL96 | 1410 | A- | VPusUfsggcCfuUfUfgaaaGfuCfcuuucsasu | 1499 | AUGAAAGGACUUUCAAAGGCCAA | 1588 |
| 689317.1 | 1142226.1 | | | 900789.1 | | | | |
| AD- | A- | asasagg(Ahd)CfuUfUfCfaaaggccaaaL96 | 1411 | A- | VPusUfsuggCfcUfUfugaaAfgUfccuuuscsa | 1500 | UGAAAGGACUUUCAAAGGCCAAG | 1589 |
| 689318.1 | 1142228.1 | | | 152531.1 | | | | |
| AD- | A- | asasgga(Chd)UfuUfCfAfaaggccaagaL96 | 1412 | A- | VPusCfsuugGfcCfUfuugaAfaGfuccuususc | 1501 | GAAAGGACUUUCAAAGGCCAAGG | 1590 |
| 689319.1 | 1142230.1 | | | 900791.1 | | | | |
| AD- | A- | asgsgac(Uhd)UfuCfAfAfaggccaaggaL96 | 1413 | A- | VPusCfscuuGfgCfCfuuugAfaAfguccususu | 1502 | AAAGGACUUUCAAAGGCCAAGGA | 1591 |
| 689320.1 | 1142232.1 | | | 900793.1 | | | | |
| AD- | A- | asasgac(Chd)AfaAfGfAfgcaagugacaL96 | 1414 | A- | VPusGfsucaCfuUfGfcucuUfuGfgucuuscsu | 1503 | AGAAGACCAAAGAGCAAGUGACA | 1592 |
| 689452.1 | 1142536.1 | | | 901101.1 | | | | |
| AD- | A- | asasgag(Chd)AfaGfUfGfacaaauguuaL96 | 1415 | A- | VPusAfsacaUfuUfGfucacUfuGfcucuususg | 1504 | CAAAGAGCAAGUGACAAAUGUUG | 1593 |
| 689459.1 | 1142550.1 | | | 901109.1 | | | | |
| AD- | A- | gsasgca(Ahd)GfuGfAfCfaaauguuggaL96 | 1416 | A- | VPusCfscaaCfaUfUfugucAfcUfugcucsusu | 1505 | AAGAGCAAGUGACAAAUGUUGGA | 1594 |
| 689461.1 | 1142554.1 | | | 152527.1 | | | | |
| AD- | A- | asgscaa(Ghd)UfgAfCfAfaauguuggaaL96 | 1417 | A- | VPusUfsccaAfcAfUfuuguCfaCfuugcuscsu | 1506 | AGAGCAAGUGACAAAUGUUGGAG | 1595 |
| 689462.1 | 1142556.1 | | | 901113.1 | | | | |
| AD- | A- | gscsaag(Uhd)GfaCfAfAfauguuggagaL96 | 1418 | A- | VPusCfsuccAfaCfAfuuugUfcAfcuugcsusc | 1507 | GAGCAAGUGACAAAUGUUGGAGG | 1596 |
| 689463.1 | 1142558.1 | | | 901115.1 | | | | |
| AD- | A- | csasagu(Ghd)AfcAfAfAfuguuggaggaL96 | 1419 | A- | VPusCfscucCfaAfCfauuuGfuCfacuugscsu | 1508 | AGCAAGUGACAAAUGUUGGAGGA | 1597 |
| 689464.1 | 1142560.1 | | | 901117.1 | | | | |
| AD- | A- | asasuga(Ghd)GfcUfUfAfugaaaugccaL96 | 1420 | A- | VPusGfsgcaUfuUfCfauaaGfcCfucauusgsu | 1509 | ACAAUGAGGCUUAUGAAAUGCCU | 1598 |
| 689615.1 | 1142880.1 | | | 901437.1 | | | | |
| AD- | A- | asusgag(Ghd)CfuUfAfUfgaaaugccuaL96 | 1421 | A- | VPusAfsggcAfuUfUfcauaAfgCfcucaususg | 1510 | CAAUGAGGCUUAUGAAAUGCCUU | 1599 |
| 689616.1 | 1142882.1 | | | 901439.1 | | | | |
| AD- | A- | usgsagg(Chd)UfuAfUfGfaaaugccuuaL96 | 1422 | A- | VPusAfsaggCfaUfUfucauAfaGfccucasusu | 1511 | AAUGAGGCUUAUGAAAUGCCUUC | 1600 |
| 689617.1 | 1142884.1 | | | 901441.1 | | | | |
| AD- | A- | gsasggc(Uhd)UfaUfGfAfaaugccuucaL96 | 1423 | A- | VPusGfsaagGfcAfUfuucaUfaAfgccucsasu | 1512 | AUGAGGCUUAUGAAAUGCCUUCU | 1601 |
| 689618.1 | 1142886.1 | | | 901443.1 | | | | |
| AD- | A- | usgsuac(Ahd)AfgUfGfCfucaguuccaaL96 | 1424 | A- | VPusUfsggaAfcUfGfagcaCfuUfguacasasg | 1513 | CCUGUACAAGUGCUCAGUUCCAA | 3602 |
| 689747.1 | 1143102.1 | | | 1316021.1 | | | | |
| AD- | A- | gsusaca(Ahd)GfuGfCfUfcaguuccaaaL96 | 1425 | A- | VPusUfsuggAfaCfUfgagcAfcUfuguacsasa | 1514 | CUGUACAAGUGCUCAGUUCCAAU | 3603 |
| 689748.1 | 1143104.1 | | | 1316022.1 | | | | |
| AD- | A- | asgsugc(Uhd)CfaGfUfUfccaaugugcaL96 | 1426 | A- | VPusGfscacAfuUfGfgaacUfgAfgcacususg | 1515 | CAAGUGCUCAGUUCCAAUGUGCC | 1602 |
| 689753.1 | 1143114.1 | | | 901671.1 | | | | |
| AD- | A- | usgscuc(Ahd)GfuUfCfCfaaugugcccaL96 | 1427 | A- | VPusGfsggcAfcAfUfuggaAfcUfgagcascsu | 1516 | AGUGCUCAGUUCCAAUGUGCCCA | 1603 |
| 689755.1 | 1143118.1 | | | 901675.1 | | | | |
| AD- | A- | gsasagu(Chd)UfuCfCfAfucagcagugaL96 | 1428 | A- | VPusCfsacuGfcUfGfauggAfaGfacuucsasa | 1517 | UCGAAGUCUUCCAUCAGCAGUGA | 3604 |
| 689786.1 | 1143232.1 | | | 1316023.1 | | | | |
| AD- | A- | asasguc(Uhd)UfcCfAfUfcagcagugaaL96 | 1429 | A- | VPusUfscacUfgCfUfgaugGfaAfgacuuscsa | 1518 | CGAAGUCUUCCAUCAGCAGUGAU | 3605 |
| 689787.1 | 1143234.1 | | | 1316024.1 | | | | |
| AD- | A- | asgsucu(Uhd)CfcAfUfCfagcagugauaL96 | 1430 | A- | VPusAfsucaCfuGfCfugauGfgAfagacususc | 1519 | GAAGUCUUCCAUCAGCAGUGAUU | 1604 |
| 689788.1 | 1143236.1 | | | 901793.1 | | | | |
| AD- | A- | gsasagu(Ghd)AfaUfAfCfaugguagcaaL96 | 1431 | A- | VPusUfsgcuAfcCfAfuguaUfuCfacuucsasg | 1520 | CUGAAGUGAAUACAUGGUAGCAG | 1605 |
| 689835.1 | 1143336.1 | | | 901893.1 | | | | |
| AD- | A- | usgsaag(Uhd)CfuUfCfCfaucagcaguaL96 | 1432 | A- | VPusAfscugCfuGfAfuggaAfgAfcuucasasa | 1521 | UUUGAAGUCUUCCAUCAGCAGUG | 1606 |
| 689907.1 | 1316093.1 | | | 1316094.1 | | | | |
| AD- | A- | usasaaa(Ahd)CfaCfCfUfaagugacuaaL96 | 1433 | A- | VPusUfsaguCfaCfUfuaggUfgUfuuuuasasa | 1522 | AUUAAAAACACCUAAGUGACUAC | 3606 |
| 689925.1 | 1143462.1 | | | 1316128.1 | | | | |
| AD- | A- | asasaaa(Chd)AfcCfUfAfagugacuacaL96 | 1434 | A- | VPusGfsuagUfcAfCfuuagGfuGfuuuuusasa | 1523 | UUAAAAACACCUAAGUGACUACC | 1607 |
| 689926.1 | 1143464.1 | | | 902026.1 | | | | |
| AD- | A- | asasaac(Ahd)CfcUfAfAfgugacuaccaL96 | 1435 | A- | VPusGfsguaGfuCfAfcuuaGfgUfguuuususa | 1524 | UAAAAACACCUAAGUGACUACCA | 1608 |
| 689927.1 | 1143466.1 | | | 902028.1 | | | | |
| AD- | A- | asasaca(Chd)CfuAfAfGfugacuaccaaL96 | 1436 | A- | VPusUfsgguAfgUfCfacuuAfgGfuguuususu | 1525 | AAAAACACCUAAGUGACUACCAC | 1609 |
| 689928.1 | 1143468.1 | | | 902030.1 | | | | |
| AD- | A- | asascac(Chd)UfaAfGfUfgacuaccacaL96 | 1437 | A- | VPusGfsuggUfaGfUfcacuUfaGfguguususu | 1526 | AAAACACCUAAGUGACUACCACU | 1610 |
| 689929.1 | 1143470.1 | | | 902032.1 | | | | |
| AD- | A- | ascsacc(Uhd)AfaGfUfGfacuaccacuaL96 | 1438 | A- | VPusAfsgugGfuAfGfucacUfuAfggugususu | 1527 | AAACACCUAAGUGACUACCACUU | 1611 |
| 689930.1 | 1143472.1 | | | 902034.1 | | | | |
| AD- | A- | csasccu(Ahd)AfgUfGfAfcuaccacuuaL96 | 1439 | A- | VPusAfsaguGfgUfAfgucaCfuUfaggugsusu | 1528 | AACACCUAAGUGACUACCACUUA | 1612 |
| 689931.1 | 1143474.1 | | | 902036.1 | | | | |
| AD- | A- | ascscua(Ahd)GfuGfAfCfuaccacuuaaL96 | 1440 | A- | VPusUfsaagUfgGfUfagucAfcUfuaggusgsu | 1529 | ACACCUAAGUGACUACCACUUAU | 1613 |
| 689932.1 | 1143476.1 | | | 152515.1 | | | | |
| AD- | A- | cscsuaa(Ghd)UfgAfCfUfaccacuuauaL96 | 1441 | A- | VPusAfsuaaGfuGfGfuaguCfaCfuuaggsusg | 1530 | CACCUAAGUGACUACCACUUAUU | 1614 |
| 689933.1 | 1143478.1 | | | 902038.1 | | | | |
| AD- | A- | csusaag(Uhd)GfaCfUfAfccacuuauuaL96 | 1442 | A- | VPusAfsauaAfgUfGfguagUfcAfcuuagsgsu | 1531 | ACCUAAGUGACUACCACUUAUUU | 1615 |
| 689934.1 | 1143480.1 | | | 902040.1 | | | | |
| AD- | A- | usasagu(Ghd)AfcUfAfCfcacuuauuuaL96 | 1443 | A- | VPusAfsaauAfaGfUfgguaGfuCfacuuasgsg | 1532 | CCUAAGUGACUACCACUUAUUUC | 1616 |
| 689935.1 | 1143482.1 | | | 902042.1 | | | | |
| AD- | A- | asasgug(Ahd)CfuAfCfCfacuuauuucaL96 | 1444 | A- | VPusGfsaaaUfaAfGfugguAfgUfcacuusasg | 1533 | CUAAGUGACUACCACUUAUUUCU | 1617 |
| 689936.1 | 1143484.1 | | | 902044.1 | | | | |
| AD- | A- | asgsuga(Chd)UfaCfCfAfcuuauuucuaL96 | 1445 | A- | VPusAfsgaaAfuAfAfguggUfaGfucacususa | 1534 | UAAGUGACUACCACUUAUUUCUA | 1618 |
| 689937.1 | 1143486.1 | | | 902046.1 | | | | |
| AD- | A- | gsusgac(Uhd)AfcCfAfCfuuauuucuaaL96 | 1446 | A- | VPusUfsagaAfaUfAfagugGfuAfgucacsusu | 1535 | AAGUGACUACCACUUAUUUCUAA | 1619 |
| 689938.1 | 1143488.1 | | | 152519.1 | | | | |
| AD- | A- | usgsacu(Ahd)CfcAfCfUfuauuucuaaaL96 | 1447 | A- | VPusUfsuagAfaAfUfaaguGfgUfagucascsu | 1536 | AGUGACUACCACUUAUUUCUAAA | 1620 |
| 689939.1 | 1143490.1 | | | 152535.1 | | | | |
| AD- | A- | asasacu(Ahd)UfgCfAfCfcuauaaauaaL96 | 1448 | A- | VPusUfsauuUfaUfAfggugCfaUfaguuuscsa | 1537 | UGAAACUAUGCACCUAUAAAUAC | 1621 |
| 690068.1 | 1143726.1 | | | 902279.1 | | | | |
| AD- | A- | asusgug(Uhd)UfuUfAfUfuaacuugugaL96 | 1449 | A- | VPusCfsacaAfgUfUfaauaAfaAfcacauscsa | 1538 | UGAUGUGUUUUAUUAACUUGUGU | 1622 |
| 690079.1 | 1316237.1 | | | 920846.1 | | | | |
| AD- | A- | usgsugu(Uhd)UfuAfUfUfaacuuguguaL96 | 1450 | A- | VPusAfscacAfaGfUfuaauAfaAfacacasusc | 1539 | GAUGUGUUUUAUUAACUUGUGUU | 1623 |
| 690080.1 | 1316238.1 | | | 920848.1 | | | | |
| AD- | A- | ususgug(Uhd)UfuGfUfAfuauaaauggaL96 | 1451 | A- | VPusCfscauUfuAfUfauacAfaAfcacaasgsu | 1540 | ACUUGUGUUUGUAUAUAAAUGGU | 1624 |
| 690092.1 | 1143812.1 | | | 902360.1 | | | | |
| AD- | A- | usgsuac(Ahd)AfgUfGfCfucaguuccaaL96 | 1452 | A- | VPusUfsggaa(Cgn)ugagcaCfuUfguacasasg | 1541 | CCUGUACAAGUGCUCAGUUCCAA | 3607 |
| 691823.1 | 1143102.1 | | | 1318408.1 | | | | |
| AD- | A- | gsusaca(Ahd)GfuGfCfUfcaguuccaaaL96 | 1453 | A- | VPusUfsugga(Agn)cugagcAfcUfuguacsasa | 1542 | CUGUACAAGUGCUCAGUUCCAAU | 3608 |
| 691824.1 | 1143104.1 | | | 1318409.1 | | | | |
| AD- | A- | usgsaag(Uhd)CfuUfCfCfaucagcaguaL96 | 1454 | A- | VPusAfscugc(Tgn)gauggaAfgAfcuucasasa | 1543 | UUUGAAGUCUUCCAUCAGCAGUG | 1625 |
| 691843.1 | 1316093.1 | | | 1318428.1 | | | | |
| AD- | A- | gsasagu(Chd)UfuCfCfAfucagcagugaL96 | 1455 | A- | VPusCfsacug(Cgn)ugauggAfaGfacuucsasa | 1544 | UCGAAGUCUUCCAUCAGCAGUGA | 3609 |
| 691844.1 | 1143232.1 | | | 1318429.1 | | | | |
| AD- | A- | asasguc(Uhd)UfcCfAfUfcagcagugaaL96 | 1456 | A- | VPusUfscacu(Ggn)cugaugGfaAfgacuuscsa | 1545 | CGAAGUCUUCCAUCAGCAGUGAU | 3610 |
| 691845.1 | 1143234.1 | | | 1318430.1 | | | | |
| AD- | A- | usasaaa(Ahd)CfaCfCfUfaagugacuaaL96 | 1457 | A- | VPusUfsaguc(Agn)cuuaggUfgUfuuuuasasa | 1546 | AUUAAAAACACCUAAGUGACUAC | 3611 |
| 691875.1 | 1143462.1 | | | 1318460.1 | | | | |
| AD- | A- | asusgug(Uhd)UfuUfAfUfuaacuugugaL96 | 1458 | A- | VPusCfsacaa(Ggn)uuaauaAfaAfcacauscsa | 1547 | UGAUGUGUUUUAUUAACUUGUGU | 1626 |
| 691953.1 | 1316237.1 | | | 1318538.1 | | | | |
| AD- | A- | usgsugu(Uhd)UfuAfUfUfaacuuguguaL96 | 1459 | A- | VPusAfscaca(Agn)guuaauAfaAfacacasusc | 1548 | GAUGUGUUUUAUUAACUUGUGUU | 1627 |
| 691954.1 | 1316238.1 | | | 1318539.1 | | | | |

TABLE 3
Unmodified Sense and Antisense Strand Sequences of Human and Primate SNCA_siRNAs.

| | | | | | | antisense | antisense | | | |
|---|---|---|---|---|---|---|---|---|---|---|
| Duplex ID | sense name | sensetrans | Accession No. | Range | SEQ ID NO: | name | trans | Accession No. | Range | SEQ ID NO: |
| AD-595724 | A-1142132.1 | GACGACAG | NM_000345.3_ | 231-251 | 283 | A-1142133.1 | UCUUUACA | NM_000345.3_ | 229-251 | 373 |
| | | UGUGGUGU | 231- | | | | CCACACUG | 229- | | |
| | | AAAGA | 251_G21U_s | | | | UCGUCGA | 251_C1A_as | | |
| AD-595769 | A-1142222.1 | AUGAAAGG | NM_000345.3_ | 276-296 | 284 | A-1142223.1 | UGCCUUTG | NM_000345.3_ | 274-296 | 374 |
| | | ACUUUCAA | 276- | | | | AAAGUCCU | 274- | | |
| | | AGGCA | 296_C21U_s | | | | UUCAUGA | 296_G1A_as | | |
| AD-595854 | A-1142392.1 | AAAGAGGG | NM_000345.3_ | 363-383 | 285 | A-1142393.1 | UACAUAGA | NM_000345.3_ | 361-383 | 375 |
| | | UGUUCUCU | 363- | | | | GAACACCC | 361- | | |
| | | AUGUA | 383_A21U_s | | | | UCUUUUG | 383_U1A_as | | |
| AD-595855 | A-1142394.1 | AAGAGGGU | NM_000345.3_ | 364-384 | 286 | A-1142395.1 | UUACAUAG | NM_000345.3_ | 362-384 | 376 |
| | | GUUCUCUA | 364- | | | | AGAACACC | 362- | | |
| | | UGUAA | 384_G21U_s | | | | CUCUUUU | 384_C1A_as | | |
| AD-595866 | A-1142416.1 | CUCUAUGU | NM_000345.3_ | 375-395 | 287 | A-1142417.1 | UGUUUUGG | NM_000345.3_ | 373-395 | 377 |
| | | AGGCUCCA | 375- | | | | AGCCUACA | 373- | | |
| | | AAACA | 395_C21U_s | | | | UAGAGAA | 395_G1A_as | | |
| AD-595926 | A-1142536.1 | AAGACCAA | NM_000345.3_ | 435-455 | 288 | A-1142537.1 | UGUCACTU | NM_000345.3_ | 433-455 | 378 |
| | | AGAGCAAG | 435- | | | | GCUCUUUG | 433- | | |
| | | UGACA | 455_A21U_s | | | | GUCUUCU | 455_U1A_as | | |
| AD-596096 | A-1142876.1 | ACAAUGAG | NM_000345.3_ | 625-645 | 289 | A-1142877.1 | UCAUUUCA | NM_000345.3_ | 623-645 | 379 |
| | | GCUUAUGA | 625- | | | | UAAGCCUC | 623- | | |
| | | AAUGA | 645_C21U_s | | | | AUUGUCA | 645_G1A_as | | |
| AD-596100 | A-1142884.1 | UGAGGCUU | NM_000345.3_ | 629-649 | 290 | A-1142885.1 | UAAGGCAU | NM_000345.3_ | 627-649 | 380 |
| | | AUGAAAUG | 629- | | | | UUCAUAAG | 627- | | |
| | | CCUUA | 649_C21U_s | | | | CCUCAUU | 649_G1A_as | | |
| AD-596124 | A-1142932.1 | GGAAGGGU | NM_000345.3_ | 653-673 | 291 | A-1142933.1 | UCGUAGTC | NM_000345.3_ | 651-673 | 381 |
| | | AUCAAGAC | 653- | | | | UUGAUACC | 651- | | |
| | | UACGA | 673_A21U_s | | | | CUUCCUC | 673_U1A_as | | |
| AD-596126 | A-1142936.1 | AAGGGUAU | NM_000345.3_ | 655-675 | 292 | A-1142937.1 | UUUCGUAG | NM_000345.3_ | 653-675 | 382 |
| | | CAAGACUA | 655- | | | | UCUUGAUA | 653- | | |
| | | CGAAA | 675_C21U_s | | | | CCCUUCC | 675_G1A_as | | |
| AD-596127 | A-1142938.1 | AGGGUAUC | NM_000345.3_ | 656-676 | 293 | A-1142939.1 | UGUUCGTA | NM_000345.3_ | 654-676 | 383 |
| | | AAGACUAC | 656- | | | | GUCUUGAU | 654- | | |
| | | GAACA | 676_C21U_s | | | | ACCCUUC | 676_G1A_as | | |
| AD-596128 | A-1142940.1 | GGGUAUCA | NM_000345.3_ | 657-677 | 294 | A-1142941.1 | UGGUUCGU | NM_000345.3_ | 655-677 | 384 |
| | | AGACUACG | 657-677_s | | | | AGUCUUGA | 655-677_as | | |
| | | AACCA | | | | | UACCCUU | | | |
| AD-596129 | A-1142942.1 | GGUAUCAA | NM_000345.3_ | 658-678 | 295 | A-1142943.1 | UAGGUUCG | NM_000345.3_ | 656-678 | 385 |
| | | GACUACGA | 658- | | | | UAGUCUUG | 656- | | |
| | | ACCUA | 678_G21U_s | | | | AUACCCU | 678_C1A_as | | |
| AD-596130 | A-1142944.1 | GUAUCAAG | NM_000345.3_ | 659-679 | 296 | A-1142945.1 | UCAGGUTC | NM_000345.3_ | 657-679 | 386 |
| | | ACUACGAA | 659- | | | | GUAGUCUU | 657- | | |
| | | CCUGA | 679_A21U_s | | | | GAUACCC | 679_U1A_as | | |
| AD-596131 | A-1142946.1 | UAUCAAGA | NM_000345.3_ | 660-680 | 297 | A-1142947.1 | UUCAGGTU | NM_000345.3_ | 658-680 | 387 |
| | | CUACGAAC | 660- | | | | CGUAGUCU | 658- | | |
| | | CUGAA | 680_A21U_s | | | | UGAUACC | 680 UlA_as | | |
| AD-596133 | A-1142950.1 | UCAAGACU | NM_000345.3_ | 662-682 | 298 | A-1142951.1 | UCUUCAGG | NM_000345.3_ | 660-682 | 388 |
| | | ACGAACCU | 662- | | | | UUCGUAGU | 660- | | |
| | | GAAGA | 682_C21U_s | | | | CUUGAUA | 682_G1A_as | | |
| AD-596137 | A-1142958.1 | GACUACGA | NM_000345.3_ | 666-686 | 299 | A-1142959.1 | UUAGGCTU | NM_000345.3_ | 664-686 | 389 |
| | | ACCUGAAG | 666- | | | | CAGGUUCG | 664- | | |
| | | CCUAA | 686_A21U_s | | | | UAGUCUU | 686_U1A_as | | |
| AD-596144 | A-1142972.1 | AACCUGAA | NM_000345.3_ | 673-693 | 300 | A-1142973.1 | UUAUUUCU | NM_000345.3_ | 671-693 | 390 |
| | | GCCUAAGA | 673-693_s | | | | UAGGCUUC | 671-693_as | | |
| | | AAUAA | | | | | AGGUUCG | | | |
| AD-596147 | A-1142978.1 | CUGAAGCC | NM_000345.3_ | 676-696 | 301 | A-1142979.1 | UAGAUATU | NM_000345.3_ | 674-696 | 391 |
| | | UAAGAAAU | 676-696_s | | | | UCUUAGGC | 674-696_as | | |
| | | AUCUA | | | | | UUCAGGU | | | |
| AD-596168 | A-1143020.1 | UGCUCCCA | NM_000345.3_ | 697-717 | 302 | A-1143021.1 | UAUCUCAA | NM_000345.3_ | 695-717 | 392 |
| | | GUUUCUUG | 697- | | | | GAAACUGG | 695- | | |
| | | AGAUA | 717_C21U_s | | | | GAGCAAA | 717_G1A_as | | |
| AD-596169 | A-1143022.1 | GCUCCCAG | NM_000345.3_ | 698-718 | 303 | A-1143023.1 | UGAUCUCA | NM_000345.3_ | 696-718 | 393 |
| | | UUUCUUGA | 698-718_s | | | | AGAAACUG | 696-718_as | | |
| | | GAUCA | | | | | GGAGCAA | | | |
| AD-596170 | A-1143024.1 | CUCCCAGU | NM_000345.3_ | 699-719 | 304 | A-1143025.1 | UAGAUCTC | NM_000345.3_ | 697-719 | 394 |
| | | UUCUUGAG | 699- | | | | AAGAAACU | 697- | | |
| | | AUCUA | 719_G21U_s | | | | GGGAGCA | 719_C1A_as | | |
| AD-596171 | A-1143026.1 | UCCCAGUU | NM_000345.3_ | 700-720 | 305 | A-1143027.1 | UCAGAUCU | NM_000345.3_ | 698-720 | 395 |
| | | UCUUGAGA | 700- | | | | CAAGAAAC | 698- | | |
| | | UCUGA | 720_C21U_s | | | | UGGGAGC | 720_G1A_as | | |
| AD-596172 | A-1143028.1 | CCCAGUUU | NM_000345.3_ | 701-721 | 306 | A-1143029.1 | UGCAGATC | NM_000345.3_ | 699-721 | 396 |
| | | CUUGAGAU | 701-721_s | | | | UCAAGAAA | 699-721_as | | |
| | | CUGCA | | | | | CUGGGAG | | | |
| AD-596175 | A-1143034.1 | AGUUUCUU | NM_000345.3_ | 704-724 | 307 | A-1143035.1 | UUCAGCAG | NM_000345.3_ | 702-724 | 397 |
| | | GAGAUCUG | 704- | | | | AUCUCAAG | 702- | | |
| | | CUGAA | 724_C21U_s | | | | AAACUGG | 724_G1A_as | | |
| AD-596177 | A-1143038.1 | UUUCUUGA | NM_000345.3_ | 706-726 | 308 | A-1143039.1 | UUGUCAGC | NM_000345.3_ | 704-726 | 398 |
| | | GAUCUGCU | 706- | | | | AGAUCUCA | 704- | | |
| | | GACAA | 726_G21U_s | | | | AGAAACU | 726_C1A_as | | |
| AD-596215 | A-1143114.1 | AGUGCUCA | NM_000345.3_ | 744-764 | 309 | A-1143115.1 | UGCACATU | NM_000345.3_ | 742-764 | 399 |
| | | GUUCCAAU | 744- | | | | GGAACUGA | 742- | | |
| | | GUGCA | 764_C21U_s | | | | GCACUUG | 764_G1A_as | | |
| AD-596231 | A-1143146.1 | GUGCCCAG | NM_000345.3_ | 760-780 | 310 | A-1143147.1 | UGAAAUGU | NM_000345.3_ | 758-780 | 400 |
| | | UCAUGACA | 760-780_s | | | | CAUGACUG | 758-780_as | | |
| | | UUUCA | | | | | GGCACAU | | | |
| AD-596235 | A-1143154.1 | CCAGUCAU | NM_000345.3_ | 764-784 | 311 | A-1143155.1 | UUUGAGAA | NM_000345.3_ | 762-784 | 401 |
| | | GACAUUUC | 764- | | | | AUGUCAUG | 762- | | |
| | | UCAAA | 784_A21U_s | | | | ACUGGGC | 784_U1A_as | | |
| AD-596283 | A-1143250.1 | CAUCAGCA | NM_000345.3_ | 812-832 | 312 | A-1143251.1 | UUACUUCA | NM_000345.3_ | 810-832 | 402 |
| | | GUGAUUGA | 812-832_s | | | | AUCACUGC | 810-832_as | | |
| | | AGUAA | | | | | UGAUGGA | | | |
| AD-596319 | A-1143322.1 | UUUCACUG | NM_000345.3_ | 869-889 | 313 | A-1143323.1 | UAUGUATU | NM_000345.3_ | 867-889 | 403 |
| | | AAGUGAAU | 869- | | | | CACUUCAG | 867- | | |
| | | ACAUA | 889_G21U_s | | | | UGAAAGG | 889_C1A_as | | |
| AD-596320 | A-1143324.1 | UUCACUGA | NM_000345.3_ | 870-890 | 314 | A-1143325.1 | UCAUGUAU | NM_000345.3_ | 868-890 | 404 |
| | | AGUGAAUA | 870- | | | | UCACUUCA | 868- | | |
| | | CAUGA | 890_G21U_s | | | | GUGAAAG | 890_C1A_as | | |
| AD-596322 | A-1143328.1 | CACUGAAG | NM_000345.3_ | 872-892 | 315 | A-1143329.1 | UACCAUGU | NM_000345.3_ | 870-892 | 405 |
| | | UGAAUACA | 872- | | | | AUUCACUU | 870- | | |
| | | UGGUA | 892_A21U_s | | | | CAGUGAA | 892_U1A_as | | |
| AD-596323 | A-1143330.1 | ACUGAAGU | NM_000345.3_ | 873-893 | 316 | A-1143331.1 | UUACCATG | NM_000345.3_ | 871-893 | 406 |
| | | GAAUACAU | 873- | | | | UAUUCACU | 871- | | |
| | | GGUAA | 893_G21U_s | | | | UCAGUGA | 893_C1A_as | | |
| AD-596325 | A-1143334.1 | UGAAGUGA | NM_000345.3_ | 875-895 | 317 | A-1143335.1 | UGCUACCA | NM_000345.3_ | 873-895 | 407 |
| | | AUACAUGG | 875- | | | | UGUAUUCA | 873- | | |
| | | UAGCA | 895_A21U_s | | | | CUUCAGU | 895_U1A_as | | |
| AD-596326 | A-1143336.1 | GAAGUGAA | NM_000345.3_ | 876-896 | 318 | A-1143337.1 | UUGCUACC | NM_000345.3_ | 874-896 | 408 |
| | | UACAUGGU | 876- | | | | AUGUAUUC | 874- | | |
| | | AGCAA | 896_G21U_s | | | | ACUUCAG | 896_C1A_as | | |
| AD-596362 | A-1143408.1 | UGGAUUUU | NM_000345.3_ | 912-932 | 319 | A-1143409.1 | UGAUUGAA | NM_000345.3_ | 910-932 | 409 |
| | | GUGGCUUC | 912-932_s | | | | GCCACAAA | 910-932_as | | |
| | | AAUCA | | | | | AUCCACA | | | |
| AD-596390 | A-1143464.1 | AAAAACAC | NM_000345.3_ | 951-971 | 320 | A-1143465.1 | UGUAGUCA | NM_000345.3_ | 949-971 | 410 |
| | | CUAAGUGA | 951- | | | | CUUAGGUG | 949- | | |
| | | CUACA | 971_C21U_s | | | | UUUUUAA | 971_G1A_as | | |
| AD-596391 | A-1143466.1 | AAAACACC | NM_000345.3_ | 952-972 | 321 | A-1143467.1 | UGGUAGTC | NM_000345.3_ | 950-972 | 411 |
| | | UAAGUGAC | 952- | | | | ACUUAGGU | 950- | | |
| | | UACCA | 972_A21U_s | | | | GUUUUUA | 972_U1A_as | | |
| AD-596392 | A-1143468.1 | AAACACCU | NM_000345.3_ | 953-973 | 322 | A-1143469.1 | UUGGUAGU | NM_000345.3_ | 951-973 | 412 |
| | | AAGUGACU | 953- | | | | CACUUAGG | 951- | | |
| | | ACCAA | 973_C21U_s | | | | UGUUUUU | 973_G1A_as | | |
| AD-596396 | A-1143476.1 | ACCUAAGU | NM_000345.3_ | 957-977 | 323 | A-1143477.1 | UUAAGUGG | NM_000345.3_ | 955-977 | 413 |
| | | GACUACCA | 957-977_s | | | | UAGUCACU | 955-977_as | | |
| | | CUUAA | | | | | UAGGUGU | | | |
| AD-596402 | A-1143488.1 | GUGACUAC | NM_000345.3_ | 963-983 | 324 | A-1143489.1 | UUAGAAAU | NM_000345.3_ | 961-983 | 414 |
| | | CACUUAUU | 963- | | | | AAGUGGUA | 961- | | |
| | | UCUAA | 983_A21U_s | | | | GUCACUU | 983_U1A_as | | |
| AD-596425 | A-1143534.1 | CUGUUGUU | NM_000345.3_ | 1005-1025 | 325 | A-1143535.1 | UUAACAAC | NM_000345.3_ | 1003-1025 | 415 |
| | | CAGAAGUU | 1005- | | | | UUCUGAAC | 1003- | | |
| | | GUUAA | 1025_G21U_s | | | | AACAGCA | 1025_C1A_as | | |
| AD-596426 | A-1143536.1 | UGUUGUUC | NM_000345.3_ | 1006-1026 | 326 | A-1143537.1 | UCUAACAA | NM_000345.3_ | 1004-1026 | 416 |
| | | AGAAGUUG | 1006-1026_s | | | | CUUCUGAA | 1004-1026_as | | |
| | | UUAGA | | | | | CAACAGC | | | |
| AD-596427 | A-1143538.1 | GUUGUUCA | NM_000345.3_ | 1007-1027 | 327 | A-1143539.1 | UACUAACA | NM_000345.3_ | 1005-1027 | 417 |
| | | GAAGUUGU | 1007- | | | | ACUUCUGA | 1005- | | |
| | | UAGUA | 1027_G21U_s | | | | ACAACAG | 1027_C1A_as | | |
| AD-596431 | A-1143546.1 | UUCAGAAG | NM_000345.3_ | 1011-1031 | 328 | A-1143547.1 | UAAUCACU | NM_000345.3_ | 1009-1031 | 418 |
| | | UUGUUAGU | 1011-1031_s | | | | AACAACUU | 1009-1031_as | | |
| | | GAUUA | | | | | CUGAACA | | | |
| AD-596436 | A-1143556.1 | AAGUUGUU | NM_000345.3_ | 1016-1036 | 329 | A-1143557.1 | UUAGCAAA | NM_000345.3_ | 1014-1036 | 419 |
| | | AGUGAUUU | 1016-1036_S | | | | UCACUAAC | 1014-1036_as | | |
| | | GCUAA | | | | | AACUUCU | | | |
| AD-596469 | A-1143622.1 | UUUUAAUG | NM_000345.3_ | 1063-1083 | 330 | A-1143623.1 | UCUUAGAC | NM_000345.3_ | 1061-1083 | 420 |
| | | AUACUGUC | 1063- | | | | AGUAUCAU | 1061- | | |
| | | UAAGA | 1083_A21U_s | | | | UAAAAGA | 1083_U1A_as | | |
| AD-596477 | A-1143638.1 | AUACUGUC | NM_000345.3_ | 1071-1091 | 331 | A-1143639.1 | UUCAUUAU | NM_000345.3_ | 1069-1091 | 421 |
| | | UAAGAAUA | 1071- | | | | UCUUAGAC | 1069- | | |
| | | AUGAA | 1091_C21U_s | | | | AGUAUCA | 1091_G1A_as | | |
| AD-596515 | A-1143714.1 | AGCAUGAA | NM_000345.3_ | 1136-1156 | 332 | A-1143715.1 | UUAGGUGC | NM_000345.3_ | 1134-1156 | 422 |
| | | ACUAUGCA | 1136-1156 S | | | | AUAGUUUC | 1134-1156_as | | |
| | | CCUAA | | | | | AUGCUCA | | | |
| AD-596517 | A-1143718.1 | CAUGAAAC | NM_000345.3_ | 1138-1158 | 333 | A-1143719.1 | UUAUAGGU | NM_000345.3_ | 1136-1158 | 423 |
| | | UAUGCACC | 1138- | | | | GCAUAGUU | 1136- | | |
| | | UAUAA | 1158_A21U_s | | | | UCAUGCU | 1158_U1A_as | | |
| AD-596605 | A-1143894.1 | UUUAUCCC | NM_000345.3_ | 1269-1289 | 334 | A-1143895.1 | UUUAAAGU | NM_000345.3_ | 1267-1289 | 424 |
| | | AUCUCACU | 1269-1289_s | | | | GAGAUGGG | 1267-1289_as | | |
| | | UUAAA | | | | | AUAAAAA | | | |
| AD-596606 | A-1143896.1 | UUAUCCCA | NM_000345.3_ | 1270-1290 | 335 | A-1143897.1 | UAUUAAAG | NM_000345.3_ | 1268-1290 | 425 |
| | | UCUCACUU | 1270- | | | | UGAGAUGG | 1268- | | |
| | | UAAUA | 1290_A21U_s | | | | GAUAAAA | 1290_U1A_as | | |
| AD-596609 | A-1143902.1 | UCCCAUCUC | NM_000345.3_ | 1273-1293 | 336 | A-1143903.1 | UAUUAUTA | NM_000345.3_ | 1271-1293 | 426 |
| | | ACUUUAAU | 1273- | | | | AAGUGAGA | 1271- | | |
| | | AAUA | 1293_A21U_s | | | | UGGGAUA | 1293_U1A_as | | |
| AD-596709 | A-1144102.1 | AAAAUGGA | NM_000345.3_ | 1399-1419 | 337 | A-1144103.1 | UUAGGGTU | NM_000345.3_ | 1397-1419 | 427 |
| | | ACAUUAAC | 1399- | | | | AAUGUUCC | 1397- | | |
| | | CCUAA | 1419_C21U_s | | | | AUUUUCU | 1419_G1A_as | | |
| AD-597019 | A-1144722.1 | AUUAGCAC | NM_000345.3_ | 1850-1870 | 338 | A-1144723.1 | UAUGUGCU | NM_000345.3_ | 1848-1870 | 428 |
| | | AUAUUAGC | 1850-1870_s | | | | AAUAUGUG | 1848-1870_as | | |
| | | ACAUA | | | | | CUAAUGU | | | |
| AD-597232 | A-1145148.1 | UCUCUUUC | NM_000345.3_ | 2138-2158 | 339 | A-1145149.1 | UUAGAUCU | NM_000345.3_ | 2136-2158 | 429 |
| | | AGGGAAGA | 2138-2158_s | | | | UCCCUGAA | 2136-2158_as | | |
| | | UCUAA | | | | | AGAGAAA | | | |
| AD-597297 | A-1145278.1 | AAGUCACU | NM_000345.3_ | 2271-2291 | 340 | A-1145279.1 | UAUACUTU | NM_000345.3_ | 2269-2291 | 430 |
| | | AGUAGAAA | 2271- | | | | CUACUAGU | 2269- | | |
| | | GUAUA | 2291_A21U_s | | | | GACUUUU | 2291_U1A_as | | |
| AD-597298 | A-1145280.1 | AGUCACUA | NM_000345.3_ | 2272-2292 | 341 | A-1145281.1 | UUAUACTU | NM_000345.3_ | 2270-2292 | 431 |
| | | GUAGAAAG | 2272- | | | | UCUACUAG | 2270- | | |
| | | UAUAA | 2292_A21U_s | | | | UGACUUU | 2292_U1A_as | | |
| AD-597325 | A-1145334.1 | CAGAAUAU | NM_000345.3_ | 2301-2321 | 342 | A-1145335.1 | UAGCAUGU | NM_000345.3_ | 2299-2321 | 432 |
| | | UCUAGACA | 2301- | | | | CUAGAAUA | 2299- | | |
| | | UGCUA | 2321_A21U_s | | | | UUCUGUC | 2321_U1A_as | | |
| AD-597326 | A-1145336.1 | AGAAUAUU | NM_000345.3_ | 2302-2322 | 343 | A-1145337.1 | UUAGCATG | NM_000345.3_ | 2300-2322 | 433 |
| | | CUAGACAU | 2302- | | | | UCUAGAAU | 2300- | | |
| | | GCUAA | 2322_G21U_s | | | | AUUCUGU | 2322_C1A_as | | |
| AD-597327 | A-1145338.1 | GAAUAUUC | NM_000345.3_ | 2303-2323 | 344 | A-1145339.1 | UCUAGCAU | NM_000345.3_ | 2301-2323 | 434 |
| | | UAGACAUG | 2303- | | | | GUCUAGAA | 2301- | | |
| | | CUAGA | 2323_C21U_s | | | | UAUUCUG | 2323_G1A_as | | |
| AD-597335 | A-1145354.1 | UAGACAUG | NM_000345.3_ | 2311-2331 | 345 | A-1145355.1 | UAUAAACU | NM_000345.3_ | 2309-2331 | 435 |
| | | CUAGCAGU | 2311- | | | | GCUAGCAU | 2309- | | |
| | | UUAUA | 2331_A21U_s | | | | GUCUAGA | 2331_U1A_as | | |
| AD-597397 | A-1145478.1 | GAGGAAUG | NM_000345.3_ | 2381-2401 | 346 | A-1145479.1 | UCUUAUAG | NM_000345.3_ | 2379-2401 | 436 |
| | | AGUGACUA | 2381- | | | | UCACUCAU | 2379- | | |
| | | UAAGA | 2401_G21U_s | | | | UCCUCCU | 2401_C1A_as | | |
| AD-597398 | A-1145480.1 | AGGAAUGA | NM_000345.3_ | 2382-2402 | 347 | A-1145481.1 | UCCUUATA | NM_000345.3_ | 2380-2402 | 437 |
| | | GUGACUAU | 2382- | | | | GUCACUCA | 2380- | | |
| | | AAGGA | 2402_A21U_s | | | | UUCCUCC | 2402_U1A_as | | |
| AD-597404 | A-1145492.1 | GAGUGACU | NM_000345.3_ | 2388-2408 | 348 | A-1145493.1 | UAACCATCC | NM_000345.3_ | 2386-2408 | 438 |
| | | AUAAGGAU | 2388- | | | | UUAUAGUC | 2386- | | |
| | | GGUUA | 2408_A21U_s | | | | ACUCAU | 2408_U1A_as | | |
| AD-597409 | A-1145502.1 | ACUAUAAG | NM_000345.3_ | 2393-2413 | 349 | A-1145503.1 | UAUGGUAA | NM_000345.3_ | 2391-2413 | 439 |
| | | GAUGGUUA | 2393- | | | | CCAUCCUU | 2391- | | |
| | | CCAUA | 2413_A21U_s | | | | AUAGUCA | 2413_U1A_as | | |
| AD-597410 | A-1145504.1 | CUAUAAGG | NM_000345.3_ | 2394-2414 | 350 | A-1145505.1 | UUAUGGTA | NM_000345.3_ | 2392-2414 | 440 |
| | | AUGGUUAC | 2394- | | | | ACCAUCCU | 2392- | | |
| | | CAUAA | 2414_G21U_s | | | | UAUAGUC | 2414_C1A_as | | |
| AD-597417 | A-1145518.1 | GAUGGUUA | NM_000345.3_ | 2401-2421 | 351 | A-1145519.1 | UAAGUUTC | NM_000345.3_ | 2399-2421 | 441 |
| | | CCAUAGAA | 2401- | | | | UAUGGUAA | 2399- | | |
| | | ACUUA | 2421_C21U_s | | | | CCAUCCU | 2421_G1A_as | | |
| AD-597443 | A-1145570.1 | ACUACUAC | NM_000345.3_ | 2445-2465 | 352 | A-1145571.1 | UGCUUAGC | NM_000345.3_ | 2443-2465 | 442 |
| | | AGAGUGCU | 2445-2465_s | | | | ACUCUGUA | 2443-2465_as | | |
| | | AAGCA | | | | | GUAGUCU | | | |
| AD-597455 | A-1145594.1 | UGCUAAGC | NM_000345.3_ | 2457-2477 | 353 | A-1145595.1 | UAUGACAC | NM_000345.3_ | 2455-2477 | 443 |
| | | UGCAUGUG | 2457- | | | | AUGCAGCU | 2455- | | |
| | | UCAUA | 2477_C21U_s | | | | UAGCACU | 2477_G1A_as | | |
| AD-597459 | A-1145602.1 | AAGCUGCA | NM_000345.3_ | 2461-2481 | 354 | A-1145603.1 | UUAAGATG | NM_000345.3_ | 2459-2481 | 444 |
| | | UGUGUCAU | 2461- | | | | ACACAUGC | 2459- | | |
| | | CUUAA | 2481_C21U_s | | | | AGCUUAG | 2481_G1A_as | | |
| AD-597460 | A-1145604.1 | AGCUGCAU | NM_000345.3_ | 2462-2482 | 355 | A-1145605.1 | UGUAAGAU | NM_000345.3_ | 2460-2482 | 445 |
| | | GUGUCAUC | 2462- | | | | GACACAUG | 2460- | | |
| | | UUACA | 2482_A21U_s | | | | CAGCUUA | 2482_U1A_as | | |
| AD-597534 | A-1145752.1 | CAGUAUAU | NM_000345.3_ | 2553-2573 | 356 | A-1145753.1 | UAACCUTCC | NM_000345.3_ | 2551-2573 | 446 |
| | | UUCAGGAA | 2553- | | | | UGAAAUAU | 2551- | | |
| | | GGUUA | 2573_A21U_s | | | | ACUGUU | 2573_U1A_as | | |
| AD-597569 | A-1145822.1 | AAAUCUAC | NM_000345.3_ | 2599-2619 | 357 | A-1145823.1 | UAUGCUGC | NM_000345.3_ | 2597-2619 | 447 |
| | | CUAAAGCA | 2599- | | | | UUUAGGUA | 2597- | | |
| | | GCAUA | 2619_A21U_s | | | | GAUUUAA | 2619_U1A_as | | |
| AD-597861 | A-1146406.1 | AGUCCUAG | NM_000345.3_ | 2951-2971 | 358 | A-1146407.1 | UUGCAAAA | NM_000345.3_ | 2949-2971 | 448 |
| | | GUUUAUUU | 2951- | | | | UAAACCUA | 2949- | | |
| | | UGCAA | 2971_G21U_s | | | | GGACUGG | 2971_C1A_as | | |
| AD-597864 | A-1146412.1 | CCUAGGUU | NM_000345.3_ | 2954-2974 | 359 | A-1146413.1 | UGUCUGCA | NM_000345.3_ | 2952-2974 | 449 |
| | | UAUUUUGC | 2954-2974_s | | | | AAAUAAAC | 2952-2974_as | | |
| | | AGACA | | | | | CUAGGAC | | | |
| AD-597894 | A-1146472.1 | CCAAGUUA | NM_000345.3_ | 2984-3004 | 360 | A-1146473.1 | UUAUGAGG | NM_000345.3_ | 2982-3004 | 450 |
| | | UUCAGCCU | 2984-3004_s | | | | CUGAAUAA | 2982-3004_as | | |
| | | CAUAA | | | | | CUUGGGA | | | |
| AD-597898 | A-1146480.1 | GUUAUUCA | NM_000345.3_ | 2988-3008 | 361 | A-1146481.1 | UGUCAUAU | NM_000345.3_ | 2986-3008 | 451 |
| | | GCCUCAUA | 2988-3008_s | | | | GAGGCUGA | 2986-3008_as | | |
| | | UGACA | | | | | AUAACUU | | | |
| AD-597899 | A-1146482.1 | UUAUUCAG | NM_000345.3_ | 2989-3009 | 362 | A-1146483.1 | UAGUCATA | NM_000345.3_ | 2987-3009 | 452 |
| | | CCUCAUAU | 2989- | | | | UGAGGCUG | 2987- | | |
| | | GACUA | 3009_C21U_s | | | | AAUAACU | 3009_G1A_as | | |
| AD-597900 | A-1146484.1 | UAUUCAGC | NM_000345.3_ | 2990-3010 | 363 | A-1146485.1 | UGAGUCAU | NM_000345.3_ | 2988-3010 | 453 |
| | | CUCAUAUG | 2990- | | | | AUGAGGCU | 2988- | | |
| | | ACUCA | 3010_C21U_s | | | | GAAUAAC | 3010_G1A_as | | |
| AD-597925 | A-1146534.1 | UCGGCUUU | NM_000345.3_ | 3015-3035 | 364 | A-1146535.1 | UAACUGTU | NM_000345.3_ | 3013-3035 | 454 |
| | | ACCAAAAC | 3015- | | | | UUGGUAAA | 3013- | | |
| | | AGUUA | 3035_C21U_s | | | | GCCGACC | 3035_G1A_as | | |
| AD-597927 | A-1146538.1 | GGCUUUAC | NM_000345.3_ | 3017-3037 | 365 | A-1146539.1 | UUGAACTG | NM_000345.3_ | 3015-3037 | 455 |
| | | CAAAACAG | 3017- | | | | UUUUGGUA | 3015- | | |
| | | UUCAA | 3037_G21U_s | | | | AAGCCGA | 3037_C1A_as | | |
| AD-597937 | A-1146558.1 | AAACAGUU | NM_000345.3_ | 3027-3047 | 366 | A-1146559.1 | UAAGUGCA | NM_000345.3_ | 3025-3047 | 456 |
| | | CAGAGUGC | 3027-3047_s | | | | CUCUGAAC | 3025-3047_as | | |
| | | ACUUA | | | | | UGUUUUG | | | |
| AD-597946 | A-1146576.1 | AGAGUGCA | NM_000345.3_ | 3036-3056 | 367 | A-1146577.1 | UUGUGUGC | NM_000345.3_ | 3034-3056 | 457 |
| | | CUUUGGCA | 3036- | | | | CAAAGUGC | 3034- | | |
| | | CACAA | 3056_A21U_s | | | | ACUCUGA | 3056_U1A_as | | |
| AD-597972 | A-1146628.1 | AACAGAAC | NM_000345.3_ | 3062-3082 | 368 | A-1146629.1 | UACACATU | NM_000345.3_ | 3060-3082 | 458 |
| | | AAUCUAAU | 3062- | | | | AGAUUGUU | 3060- | | |
| | | GUGUA | 3082_G21U_s | | | | CUGUUCC | 3082_C1A_as | | |
| AD-597974 | A-1146632.1 | CAGAACAA | NM_000345.3_ | 3064-3084 | 369 | A-1146633.1 | UCCACACA | NM_000345.3_ | 3062-3084 | 459 |
| | | UCUAAUGU | 3064-3084_s | | | | UUAGAUUG | 3062-3084_as | | |
| | | GUGGA | | | | | UUCUGUU | | | |
| AD-597984 | A-1146652.1 | UAAUGUGU | NM_000345.3_ | 3074-3094 | 370 | A-1146653.1 | UGAAUACC | NM_000345.3_ | 3072-3094 | 460 |
| | | GGUUUGGU | 3074- | | | | AAACCACA | 3072- | | |
| | | AUUCA | 3094_C21U_s | | | | CAUUAGA | 3094_G1A_as | | |
| AD-597988 | A-1146660.1 | GUGUGGUU | NM_000345.3_ | 3078-3098 | 371 | A-1146661.1 | UCUUGGAA | NM_000345.3_ | 3076-3098 | 461 |
| | | UGGUAUUC | 3078-3098_s | | | | UACCAAAC | 3076-3098_as | | |
| | | CAAGA | | | | | CACACAU | | | |
| AD-597989 | A-1146662.1 | UGUGGUUU | NM_000345.3_ | 3079-3099 | 372 | A-1146663.1 | UACUUGGA | NM_000345.3_ | 3077-3099 | 462 |
| | | GGUAUUCC | 3079- | | | | AUACCAAA | 3077- | | |
| | | AAGUA | 3099_G21U_s | | | | CCACACA | 3099_C1A_as | | |
| AD-595724.1 | A-1142132.1 | GACGACAG | NM_000345.3_ | 231-251 | 733 | A-1142133.1 | UCUUUACA | NM_000345.3_ | 229-251 | 823 |
| | | UGUGGUGU | 231- | | | | CCACACUG | 229- | | |
| | | AAAGA | 251_G21U_s | | | | UCGUCGA | 251_C1A_as | | |
| AD-595769.1 | A-1142222.1 | AUGAAAGG | NM_000345.3_ | 276-296 | 734 | A-1142223.1 | UGCCUUTG | NM_000345.3_ | 274-296 | 824 |
| | | ACUUUCAA | 276- | | | | AAAGUCCU | 274- | | |
| | | AGGCA | 296_C21U_s | | | | UUCAUGA | 296_G1A_as | | |
| AD-595854.1 | A-1142392.1 | AAAGAGGG | NM_000345.3_ | 363-383 | 735 | A-1142393.1 | UACAUAGA | NM_000345.3_ | 361-383 | 825 |
| | | UGUUCUCU | 363- | | | | GAACACCC | 361- | | |
| | | AUGUA | 383_A21U_s | | | | UCUUUUG | 383_U1A_as | | |
| AD-595855.1 | A-1142394.1 | AAGAGGGU | NM_000345.3_ | 364-384 | 736 | A-1142395.1 | UUACAUAG | NM_000345.3_ | 362-384 | 826 |
| | | GUUCUCUA | 364- | | | | AGAACACC | 362- | | |
| | | UGUAA | 384_G21U_s | | | | CUCUUUU | 384_C1A_as | | |
| AD-595866.1 | A-1142416.1 | CUCUAUGU | NM_000345.3_ | 375-395 | 737 | A-1142417.1 | UGUUUUGG | NM_000345.3_ | 373-395 | 827 |
| | | AGGCUCCA | 375- | | | | AGCCUACA | 373- | | |
| | | AAACA | 395_C21U_s | | | | UAGAGAA | 395_G1A_as | | |
| AD-595926.1 | A-1142536.1 | AAGACCAA | NM_000345.3_ | 435-455 | 738 | A-1142537.1 | UGUCACTU | NM_000345.3_ | 433-455 | 828 |
| | | AGAGCAAG | 435- | | | | GCUCUUUG | 433- | | |
| | | UGACA | 455_A21U_s | | | | GUCUUCU | 455_U1A_as | | |
| AD-596096.1 | A-1142876.1 | ACAAUGAG | NM_000345.3_ | 625-645 | 739 | A-1142877.1 | UCAUUUCA | NM_000345.3_ | 623-645 | 829 |
| | | GCUUAUGA | 625- | | | | UAAGCCUC | 623- | | |
| | | AAUGA | 645_C21U_s | | | | AUUGUCA | 645_G1A_as | | |
| AD-596100.1 | A-1142884.1 | UGAGGCUU | NM_000345.3_ | 629-649 | 740 | A-1142885.1 | UAAGGCAU | NM_000345.3_ | 627-649 | 830 |
| | | AUGAAAUG | 629- | | | | UUCAUAAG | 627- | | |
| | | CCUUA | 649_C21U_s | | | | CCUCAUU | 649_G1A_as | | |
| AD-596124.1 | A-1142932.1 | GGAAGGGU | NM_000345.3_ | 653-673 | 741 | A-1142933.1 | UCGUAGTC | NM_000345.3_ | 651-673 | 831 |
| | | AUCAAGAC | 653- | | | | UUGAUACC | 651- | | |
| | | UACGA | 673_A21U_s | | | | CUUCCUC | 673_U1A_as | | |
| AD-596126.1 | A-1142936.1 | AAGGGUAU | NM_000345.3_ | 655-675 | 742 | A-1142937.1 | UUUCGUAG | NM_000345.3_ | 653-675 | 832 |
| | | CAAGACUA | 655- | | | | UCUUGAUA | 653- | | |
| | | CGAAA | 675_C21U_s | | | | CCCUUCC | 675_G1A_as | | |
| AD-596127.1 | A-1142938.1 | AGGGUAUC | NM_000345.3_ | 656-676 | 743 | A-1142939.1 | UGUUCGTA | NM_000345.3_ | 654-676 | 833 |
| | | AAGACUAC | 656- | | | | GUCUUGAU | 654- | | |
| | | GAACA | 676_C21U_s | | | | ACCCUUC | 676_G1A_as | | |
| AD-596128.1 | A-1142940.1 | GGGUAUCA | NM_000345.3_ | 657-677 | 744 | A-1142941.1 | UGGUUCGU | NM_000345.3_ | 655-677 | 834 |
| | | AGACUACG | 657-677_s | | | | AGUCUUGA | 655-677_as | | |
| | | AACCA | | | | | UACCCUU | | | |
| AD-596129.1 | A-1142942.1 | GGUAUCAA | NM_000345.3_ | 658-678 | 745 | A-1142943.1 | UAGGUUCG | NM_000345.3_ | 656-678 | 835 |
| | | GACUACGA | 658- | | | | UAGUCUUG | 656- | | |
| | | ACCUA | 678_G21U_s | | | | AUACCCU | 678_C1A_as | | |
| AD-596130.1 | A-1142944.1 | GUAUCAAG | NM_000345.3_ | 659-679 | 746 | A-1142945.1 | UCAGGUTC | NM_000345.3_ | 657-679 | 836 |
| | | ACUACGAA | 659- | | | | GUAGUCUU | 657- | | |
| | | CCUGA | 679_A21U_s | | | | GAUACCC | 679 UlA_as | | |
| AD-596131.1 | A-1142946.1 | UAUCAAGA | NM_000345.3_ | 660-680 | 747 | A-1142947.1 | UUCAGGTU | NM_000345.3_ | 658-680 | 837 |
| | | CUACGAAC | 660- | | | | CGUAGUCU | 658- | | |
| | | CUGAA | 680_A21U_s | | | | UGAUACC | 680_U1A_as | | |
| AD-596133.1 | A-1142950.1 | UCAAGACU | NM_000345.3_ | 662-682 | 748 | A-1142951.1 | UCUUCAGG | NM_000345.3_ | 660-682 | 838 |
| | | ACGAACCU | 662- | | | | UUCGUAGU | 660- | | |
| | | GAAGA | 682_C21U_s | | | | CUUGAUA | 682_G1A_as | | |
| AD-596137.1 | A-1142958.1 | GACUACGA | NM_000345.3_ | 666-686 | 749 | A-1142959.1 | UUAGGCTU | NM_000345.3_ | 664-686 | 839 |
| | | ACCUGAAG | 666- | | | | CAGGUUCG | 664- | | |
| | | CCUAA | 686_A21U_s | | | | UAGUCUU | 686_U1A_as | | |
| AD-596144.1 | A-1142972.1 | AACCUGAA | NM_000345.3_ | 673-693 | 750 | A-1142973.1 | UUAUUUCU | NM_000345.3_ | 671-693 | 840 |
| | | GCCUAAGA | 673-693 S | | | | UAGGCUUC | 671-693_as | | |
| | | AAUAA | | | | | AGGUUCG | | | |
| AD-596147.1 | A-1142978.1 | CUGAAGCC | NM_000345.3_ | 676-696 | 751 | A-1142979.1 | UAGAUATU | NM_000345.3_ | 674-696 | 841 |
| | | UAAGAAAU | 676-696_s | | | | UCUUAGGC | 674-696_as | | |
| | | AUCUA | | | | | UUCAGGU | | | |
| AD-596168.1 | A-1143020.1 | UGCUCCCA | NM_000345.3_ | 697-717 | 752 | A-1143021.1 | UAUCUCAA | NM_000345.3_ | 695-717 | 842 |
| | | GUUUCUUG | 697- | | | | GAAACUGG | 695- | | |
| | | AGAUA | 717_C21U_s | | | | GAGCAAA | 717_G1A_as | | |
| AD-596169.1 | A-1143022.1 | GCUCCCAG | NM_000345.3_ | 698-718 | 753 | A-1143023.1 | UGAUCUCA | NM_000345.3_ | 696-718 | 843 |
| | | UUUCUUGA | 698-718_s | | | | AGAAACUG | 696-718_as | | |
| | | GAUCA | | | | | GGAGCAA | | | |
| AD-596170.1 | A-1143024.1 | CUCCCAGU | NM_000345.3_ | 699-719 | 754 | A-1143025.1 | UAGAUCTC | NM_000345.3_ | 697-719 | 844 |
| | | UUCUUGAG | 699- | | | | AAGAAACU | 697- | | |
| | | AUCUA | 719_G21U_s | | | | GGGAGCA | 719_C1A_as | | |
| AD-596171.1 | A-1143026.1 | UCCCAGUU | NM_000345.3_ | 700-720 | 755 | A-1143027.1 | UCAGAUCU | NM_000345.3_ | 698-720 | 845 |
| | | UCUUGAGA | 700- | | | | CAAGAAAC | 698- | | |
| | | UCUGA | 720_C21U_s | | | | UGGGAGC | 720_G1A_as | | |
| AD-596172.1 | A-1143028.1 | CCCAGUUU | NM_000345.3_ | 701-721 | 756 | A-1143029.1 | UGCAGATC | NM_000345.3_ | 699-721 | 846 |
| | | CUUGAGAU | 701-721_s | | | | UCAAGAAA | 699-721_as | | |
| | | CUGCA | | | | | CUGGGAG | | | |
| AD-596175.1 | A-1143034.1 | AGUUUCUU | NM_000345.3_ | 704-724 | 757 | A-1143035.1 | UUCAGCAG | NM_000345.3_ | 702-724 | 847 |
| | | GAGAUCUG | 704- | | | | AUCUCAAG | 702- | | |
| | | CUGAA | 724_C21U_s | | | | AAACUGG | 724_G1A_as | | |
| AD-596177.1 | A-1143038.1 | UUUCUUGA | NM_000345.3_ | 706-726 | 758 | A-1143039.1 | UUGUCAGC | NM_000345.3_ | 704-726 | 848 |
| | | GAUCUGCU | 706- | | | | AGAUCUCA | 704- | | |
| | | GACAA | 726_G21U_s | | | | AGAAACU | 726_C1A_as | | |
| AD-596215.1 | A-1143114.1 | AGUGCUCA | NM_000345.3_ | 744-764 | 759 | A-1143115.1 | UGCACATU | NM_000345.3_ | 742-764 | 849 |
| | | GUUCCAAU | 744- | | | | GGAACUGA | 742- | | |
| | | GUGCA | 764_C21U_s | | | | GCACUUG | 764_G1A_as | | |
| AD-596231.1 | A-1143146.1 | GUGCCCAG | NM_000345.3_ | 760-780 | 760 | A-1143147.1 | UGAAAUGU | NM_000345.3_ | 758-780 | 850 |
| | | UCAUGACA | 760-780_s | | | | CAUGACUG | 758-780_as | | |
| | | UUUCA | | | | | GGCACAU | | | |
| AD-596235.1 | A-1143154.1 | CCAGUCAU | NM_000345.3_ | 764-784 | 761 | A-1143155.1 | UUUGAGAA | NM_000345.3_ | 762-784 | 851 |
| | | GACAUUUC | 764- | | | | AUGUCAUG | 762- | | |
| | | UCAAA | 784_A21U_s | | | | ACUGGGC | 784_U1A_as | | |
| AD-596283.1 | A-1143250.1 | CAUCAGCA | NM_000345.3_ | 812-832 | 762 | A-1143251.1 | UUACUUCA | NM_000345.3_ | 810-832 | 852 |
| | | GUGAUUGA | 812-832_s | | | | AUCACUGC | 810-832_as | | |
| | | AGUAA | | | | | UGAUGGA | | | |
| AD-596319.1 | A-1143322.1 | UUUCACUG | NM_000345.3_ | 869-889 | 763 | A-1143323.1 | UAUGUATU | NM_000345.3_ | 867-889 | 853 |
| | | AAGUGAAU | 869- | | | | CACUUCAG | 867- | | |
| | | ACAUA | 889_G21U_s | | | | UGAAAGG | 889_C1A_as | | |
| AD-596320.1 | A-1143324.1 | UUCACUGA | NM_000345.3_ | 870-890 | 764 | A-1143325.1 | UCAUGUAU | NM_000345.3_ | 868-890 | 854 |
| | | AGUGAAUA | 870- | | | | UCACUUCA | 868- | | |
| | | CAUGA | 890_G21U_s | | | | GUGAAAG | 890_C1A_as | | |
| AD-596322.1 | A-1143328.1 | CACUGAAG | NM_000345.3_ | 872-892 | 765 | A-1143329.1 | UACCAUGU | NM_000345.3_ | 870-892 | 855 |
| | | UGAAUACA | 872- | | | | AUUCACUU | 870- | | |
| | | UGGUA | 892_A21U_s | | | | CAGUGAA | 892_U1A_as | | |
| AD-596323.1 | A-1143330.1 | ACUGAAGU | NM_000345.3_ | 873-893 | 766 | A-1143331.1 | UUACCATG | NM_000345.3_ | 871-893 | 856 |
| | | GAAUACAU | 873- | | | | UAUUCACU | 871- | | |
| | | GGUAA | 893_G21U_s | | | | UCAGUGA | 893_C1A_as | | |
| AD-596325.1 | A-1143334.1 | UGAAGUGA | NM_000345.3_ | 875-895 | 767 | A-1143335.1 | UGCUACCA | NM_000345.3_ | 873-895 | 857 |
| | | AUACAUGG | 875- | | | | UGUAUUCA | 873- | | |
| | | UAGCA | 895_A21U_s | | | | CUUCAGU | 895_U1A_as | | |
| AD-596326.1 | A-1143336.1 | GAAGUGAA | NM_000345.3_ | 876-896 | 768 | A-1143337.1 | UUGCUACC | NM_000345.3_ | 874-896 | 858 |
| | | UACAUGGU | 876- | | | | AUGUAUUC | 874- | | |
| | | AGCAA | 896_G21U_s | | | | ACUUCAG | 896_C1A_as | | |
| AD-596362.1 | A-1143408.1 | UGGAUUUU | NM_000345.3_ | 912-932 | 769 | A-1143409.1 | UGAUUGAA | NM_000345.3_ | 910-932 | 859 |
| | | GUGGCUUC | 912-932_s | | | | GCCACAAA | 910-932_as | | |
| | | AAUCA | | | | | AUCCACA | | | |
| AD-596390.1 | A-1143464.1 | AAAAACAC | NM_000345.3_ | 951-971 | 770 | A-1143465.1 | UGUAGUCA | NM_000345.3_ | 949-971 | 860 |
| | | CUAAGUGA | 951- | | | | CUUAGGUG | 949- | | |
| | | CUACA | 971_C21U_s | | | | UUUUUAA | 971_G1A_as | | |
| AD-596391.1 | A-1143466.1 | AAAACACC | NM_000345.3_ | 952-972 | 771 | A-1143467.1 | UGGUAGTC | NM_000345.3_ | 950-972 | 861 |
| | | UAAGUGAC | 952- | | | | ACUUAGGU | 950- | | |
| | | UACCA | 972_A21U_s | | | | GUUUUUA | 972_U1A_as | | |
| AD-596392.1 | A-1143468.1 | AAACACCU | NM_000345.3_ | 953-973 | 772 | A-1143469.1 | UUGGUAGU | NM_000345.3_ | 951-973 | 862 |
| | | AAGUGACU | 953- | | | | CACUUAGG | 951- | | |
| | | ACCAA | 973_C21U_s | | | | UGUUUUU | 973_G1A_as | | |
| AD-596396.1 | A-1143476.1 | ACCUAAGU | NM_000345.3_ | 957-977 | 773 | A-1143477.1 | UUAAGUGG | NM_000345.3_ | 955-977 | 863 |
| | | GACUACCA | 957-977_s | | | | UAGUCACU | 955-977_as | | |
| | | CUUAA | | | | | UAGGUGU | | | |
| AD-596402.1 | A-1143488.1 | GUGACUAC | NM_000345.3_ | 963-983 | 774 | A-1143489.1 | UUAGAAAU | NM_000345.3_ | 961-983 | 864 |
| | | CACUUAUU | 963- | | | | AAGUGGUA | 961- | | |
| | | UCUAA | 983_A21U_s | | | | GUCACUU | 983_U1A_as | | |
| AD-596425.1 | A-1143534.1 | CUGUUGUU | NM_000345.3_ | 1005-1025 | 775 | A-1143535.1 | UUAACAAC | NM_000345.3_ | 1003-1025 | 865 |
| | | CAGAAGUU | 1005- | | | | UUCUGAAC | 1003- | | |
| | | GUUAA | 1025_G21U_s | | | | AACAGCA | 1025_C1A_as | | |
| AD-596426.1 | A-1143536.1 | UGUUGUUC | NM_000345.3_ | 1006-1026 | 776 | A-1143537.1 | UCUAACAA | NM_000345.3_ | 1004-1026 | 866 |
| | | AGAAGUUG | 1006-1026_s | | | | CUUCUGAA | 1004-1026_as | | |
| | | UUAGA | | | | | CAACAGC | | | |
| AD-596427.1 | A-1143538.1 | GUUGUUCA | NM_000345.3_ | 1007-1027 | 777 | A-1143539.1 | UACUAACA | NM_000345.3_ | 1005-1027 | 867 |
| | | GAAGUUGU | 1007- | | | | ACUUCUGA | 1005- | | |
| | | UAGUA | 1027_G21U_s | | | | ACAACAG | 1027_C1A_as | | |
| AD-596431.1 | A-1143546.1 | UUCAGAAG | NM_000345.3_ | 1011-1031 | 778 | A-1143547.1 | UAAUCACU | NM_000345.3_ | 1009-1031 | 868 |
| | | UUGUUAGU | 1011-1031_s | | | | AACAACUU | 1009-1031_as | | |
| | | GAUUA | | | | | CUGAACA | | | |
| AD-596436.1 | A-1143556.1 | AAGUUGUU | NM_000345.3_ | 1016-1036 | 779 | A-1143557.1 | UUAGCAAA | NM_000345.3_ | 1014-1036 | 869 |
| | | AGUGAUUU | 1016-1036_s | | | | UCACUAAC | 1014-1036_as | | |
| | | GCUAA | | | | | AACUUCU | | | |
| AD-596469.1 | A-1143622.1 | UUUUAAUG | NM_000345.3_ | 1063-1083 | 780 | A-1143623.1 | UCUUAGAC | NM_000345.3_ | 1061-1083 | 870 |
| | | AUACUGUC | 1063- | | | | AGUAUCAU | 1061- | | |
| | | UAAGA | 1083_A21U_s | | | | UAAAAGA | 1083_U1A_as | | |
| AD-596477.1 | A-1143638.1 | AUACUGUC | NM_000345.3_ | 1071-1091 | 781 | A-1143639.1 | UUCAUUAU | NM_000345.3_ | 1069-1091 | 871 |
| | | UAAGAAUA | 1071- | | | | UCUUAGAC | 1069- | | |
| | | AUGAA | 1091_C21U_s | | | | AGUAUCA | 1091_G1A_as | | |
| AD-596515.1 | A-1143714.1 | AGCAUGAA | NM_000345.3_ | 1136-1156 | 782 | A-1143715.1 | UUAGGUGC | NM_000345.3_ | 1134-1156 | 872 |
| | | ACUAUGCA | 1136-1156_s | | | | AUAGUUUC | 1134-1156_as | | |
| | | CCUAA | | | | | AUGCUCA | | | |
| AD-596517.1 | A-1143718.1 | CAUGAAAC | NM_000345.3_ | 1138-1158 | 783 | A-1143719.1 | UUAUAGGU | NM_000345.3_ | 1136-1158 | 873 |
| | | UAUGCACC | 1138- | | | | GCAUAGUU | 1136- | | |
| | | UAUAA | 1158_A21U_s | | | | UCAUGCU | 1158_U1A_as | | |
| AD-596605.1 | A-1143894.1 | UUUAUCCC | NM_000345.3_ | 1269-1289 | 784 | A-1143895.1 | UUUAAAGU | NM_000345.3_ | 1267-1289 | 874 |
| | | AUCUCACU | 1269-1289_s | | | | GAGAUGGG | 1267-1289_as | | |
| | | UUAAA | | | | | AUAAAAA | | | |
| AD-596606.1 | A-1143896.1 | UUAUCCCA | NM_000345.3_ | 1270-1290 | 785 | A-1143897.1 | UAUUAAAG | NM_000345.3_ | 1268-1290 | 875 |
| | | UCUCACUU | 1270- | | | | UGAGAUGG | 1268- | | |
| | | UAAUA | 1290_A21U_s | | | | GAUAAAA | 1290_U1A_as | | |
| AD-596609.1 | A-1143902.1 | UCCCAUCUC | NM_000345.3_ | 1273-1293 | 786 | A-1143903.1 | UAUUAUTA | NM_000345.3_ | 1271-1293 | 876 |
| | | ACUUUAAU | 1273- | | | | AAGUGAGA | 1271- | | |
| | | AAUA | 1293_A21U_s | | | | UGGGAUA | 1293_U1A_as | | |
| AD-596709.1 | A-1144102.1 | AAAAUGGA | NM_000345.3_ | 1399-1419 | 787 | A-1144103.1 | UUAGGGTU | NM_000345.3_ | 1397-1419 | 877 |
| | | ACAUUAAC | 1399- | | | | AAUGUUCC | 1397- | | |
| | | CCUAA | 1419_C21U_s | | | | AUUUUCU | 1419_G1A_as | | |
| AD-597019.1 | A-1144722.1 | AUUAGCAC | NM_000345.3_ | 1850-1870 | 788 | A-1144723.1 | UAUGUGCU | NM_000345.3_ | 1848-1870 | 878 |
| | | AUAUUAGC | 1850-1870_s | | | | AAUAUGUG | 1848-1870_as | | |
| | | ACAUA | | | | | CUAAUGU | | | |
| AD-597232.1 | A-1145148.1 | UCUCUUUC | NM_000345.3_ | 2138-2158 | 789 | A-1145149.1 | UUAGAUCU | NM_000345.3_ | 2136-2158 | 879 |
| | | AGGGAAGA | 2138-2158_s | | | | UCCCUGAA | 2136-2158_as | | |
| | | UCUAA | | | | | AGAGAAA | | | |
| AD-597297.1 | A-1145278.1 | AAGUCACU | NM_000345.3_ | 2271-2291 | 790 | A-1145279.1 | UAUACUTU | NM_000345.3_ | 2269-2291 | 880 |
| | | AGUAGAAA | 2271- | | | | CUACUAGU | 2269- | | |
| | | GUAUA | 2291_A21U_s | | | | GACUUUU | 2291_U1A_as | | |
| AD-597298.1 | A-1145280.1 | AGUCACUA | NM_000345.3_ | 2272-2292 | 791 | A-1145281.1 | UUAUACTU | NM_000345.3_ | 2270-2292 | 881 |
| | | GUAGAAAG | 2272- | | | | UCUACUAG | 2270- | | |
| | | UAUAA | 2292_A21U_s | | | | UGACUUU | 2292_U1A_as | | |
| AD-597325.1 | A-1145334.1 | CAGAAUAU | NM_000345.3_ | 2301-2321 | 792 | A-1145335.1 | UAGCAUGU | NM_000345.3_ | 2299-2321 | 882 |
| | | UCUAGACA | 2301- | | | | CUAGAAUA | 2299- | | |
| | | UGCUA | 2321_A21U_s | | | | UUCUGUC | 2321_U1A_as | | |
| AD-597326.1 | A-1145336.1 | AGAAUAUU | NM_000345.3_ | 2302-2322 | 793 | A-1145337.1 | UUAGCATG | NM_000345.3_ | 2300-2322 | 883 |
| | | CUAGACAU | 2302- | | | | UCUAGAAU | 2300- | | |
| | | GCUAA | 2322_G21U_s | | | | AUUCUGU | 2322_C1A_as | | |
| AD-597327.1 | A-1145338.1 | GAAUAUUC | NM_000345.3_ | 2303-2323 | 794 | A-1145339.1 | UCUAGCAU | NM_000345.3_ | 2301-2323 | 884 |
| | | UAGACAUG | 2303- | | | | GUCUAGAA | 2301- | | |
| | | CUAGA | 2323_C21U_s | | | | UAUUCUG | 2323_G1A_as | | |
| AD-597335.1 | A-1145354.1 | UAGACAUG | NM_000345.3_ | 2311-2331 | 795 | A-1145355.1 | UAUAAACU | NM_000345.3_ | 2309-2331 | 885 |
| | | CUAGCAGU | 2311- | | | | GCUAGCAU | 2309- | | |
| | | UUAUA | 2331_A21U_s | | | | GUCUAGA | 2331_U1A_as | | |
| AD-597397.1 | A-1145478.1 | GAGGAAUG | NM_000345.3_ | 2381-2401 | 796 | A-1145479.1 | UCUUAUAG | NM_000345.3_ | 2379-2401 | 886 |
| | | AGUGACUA | 2381- | | | | UCACUCAU | 2379- | | |
| | | UAAGA | 2401_G21U_s | | | | UCCUCCU | 2401_C1A_as | | |
| AD-597398.1 | A-1145480.1 | AGGAAUGA | NM_000345.3_ | 2382-2402 | 797 | A-1145481.1 | UCCUUATA | NM_000345.3_ | 2380-2402 | 887 |
| | | GUGACUAU | 2382- | | | | GUCACUCA | 2380- | | |
| | | AAGGA | 2402_A21U_s | | | | UUCCUCC | 2402_U1A_as | | |
| AD-597404.1 | A-1145492.1 | GAGUGACU | NM_000345.3_ | 2388-2408 | 798 | A-1145493.1 | UAACCATCC | NM_000345.3_ | 2386-2408 | 888 |
| | | AUAAGGAU | 2388- | | | | UUAUAGUC | 2386- | | |
| | | GGUUA | 2408_A21U_s | | | | ACUCAU | 2408_U1A_as | | |
| AD-597409.1 | A-1145502.1 | ACUAUAAG | NM_000345.3_ | 2393-2413 | 799 | A-1145503.1 | UAUGGUAA | NM_000345.3_ | 2391-2413 | 889 |
| | | GAUGGUUA | 2393- | | | | CCAUCCUU | 2391- | | |
| | | CCAUA | 2413_A21U_s | | | | AUAGUCA | 2413_U1A_as | | |
| AD-597410.1 | A-1145504.1 | CUAUAAGG | NM_000345.3_ | 2394-2414 | 800 | A-1145505.1 | UUAUGGTA | NM_000345.3_ | 2392-2414 | 890 |
| | | AUGGUUAC | 2394- | | | | ACCAUCCU | 2392- | | |
| | | CAUAA | 2414_G21U_s | | | | UAUAGUC | 2414_C1A_as | | |
| AD-597417.1 | A-1145518.1 | GAUGGUUA | NM_000345.3_ | 2401-2421 | 801 | A-1145519.1 | UAAGUUTC | NM_000345.3_ | 2399-2421 | 891 |
| | | CCAUAGAA | 2401- | | | | UAUGGUAA | 2399- | | |
| | | ACUUA | 2421_C21U_s | | | | CCAUCCU | 2421_G1A_as | | |
| AD-597443.1 | A-1145570.1 | ACUACUAC | NM_000345.3_ | 2445-2465 | 802 | A-1145571.1 | UGCUUAGC | NM_000345.3_ | 2443-2465 | 892 |
| | | AGAGUGCU | 2445-2465_s | | | | ACUCUGUA | 2443-2465_as | | |
| | | AAGCA | | | | | GUAGUCU | | | |
| AD-597455.1 | A-1145594.1 | UGCUAAGC | NM_000345.3_ | 2457-2477 | 803 | A-1145595.1 | UAUGACAC | NM_000345.3_ | 2455-2477 | 893 |
| | | UGCAUGUG | 2457- | | | | AUGCAGCU | 2455- | | |
| | | UCAUA | 2477_C21U_s | | | | UAGCACU | 2477_G1A_as | | |
| AD-597459.1 | A-1145602.1 | AAGCUGCA | NM_000345.3_ | 2461-2481 | 804 | A-1145603.1 | UUAAGATG | NM_000345.3_ | 2459-2481 | 894 |
| | | UGUGUCAU | 2461- | | | | ACACAUGC | 2459- | | |
| | | CUUAA | 2481_C21U_s | | | | AGCUUAG | 2481_G1A_as | | |
| AD-597460.1 | A-1145604.1 | AGCUGCAU | NM_000345.3_ | 2462-2482 | 805 | A-1145605.1 | UGUAAGAU | NM_000345.3_ | 2460-2482 | 895 |
| | | GUGUCAUC | 2462- | | | | GACACAUG | 2460- | | |
| | | UUACA | 2482_A21U_s | | | | CAGCUUA | 2482_U1A_as | | |
| AD-597534.1 | A-1145752.1 | CAGUAUAU | NM_000345.3_ | 2553-2573 | 806 | A-1145753.1 | UAACCUTCC | NM_000345.3_ | 2551-2573 | 896 |
| | | UUCAGGAA | 2553- | | | | UGAAAUAU | 2551- | | |
| | | GGUUA | 2573_A21U_s | | | | ACUGUU | 2573_U1A_as | | |
| AD-597569.1 | A-1145822.1 | AAAUCUAC | NM_000345.3_ | 2599-2619 | 807 | A-1145823.1 | UAUGCUGC | NM_000345.3_ | 2597-2619 | 897 |
| | | CUAAAGCA | 2599- | | | | UUUAGGUA | 2597- | | |
| | | GCAUA | 2619_A21U_s | | | | GAUUUAA | 2619_U1A_as | | |
| AD-597861.1 | A-1146406.1 | AGUCCUAG | NM_000345.3_ | 2951-2971 | 808 | A-1146407.1 | UUGCAAAA | NM_000345.3_ | 2949-2971 | 898 |
| | | GUUUAUUU | 2951- | | | | UAAACCUA | 2949- | | |
| | | UGCAA | 2971_G21U_s | | | | GGACUGG | 2971_C1A_as | | |
| AD-597864.1 | A-1146412.1 | CCUAGGUU | NM_000345.3_ | 2954-2974 | 809 | A-1146413.1 | UGUCUGCA | NM_000345.3_ | 2952-2974 | 899 |
| | | UAUUUUGC | 2954-2974_s | | | | AAAUAAAC | 2952-2974_as | | |
| | | AGACA | | | | | CUAGGAC | | | |
| AD-597894.1 | A-1146472.1 | CCAAGUUA | NM_000345.3_ | 2984-3004 | 810 | A-1146473.1 | UUAUGAGG | NM_000345.3_ | 2982-3004 | 900 |
| | | UUCAGCCU | 2984-3004_s | | | | CUGAAUAA | 2982-3004_as | | |
| | | CAUAA | | | | | CUUGGGA | | | |
| AD-597898.1 | A-1146480.1 | GUUAUUCA | NM_000345.3_ | 2988-3008 | 811 | A-1146481.1 | UGUCAUAU | NM_000345.3_ | 2986-3008 | 901 |
| | | GCCUCAUA | 2988-3008_s | | | | GAGGCUGA | 2986-3008_as | | |
| | | UGACA | | | | | AUAACUU | | | |
| AD-597899.1 | A-1146482.1 | UUAUUCAG | NM_000345.3_ | 2989-3009 | 812 | A-1146483.1 | UAGUCATA | NM_000345.3_ | 2987-3009 | 902 |
| | | CCUCAUAU | 2989- | | | | UGAGGCUG | 2987- | | |
| | | GACUA | 3009_C21U_s | | | | AAUAACU | 3009_G1A_as | | |
| AD-597900.1 | A-1146484.1 | UAUUCAGC | NM_000345.3_ | 2990-3010 | 813 | A-1146485.1 | UGAGUCAU | NM_000345.3_ | 2988-3010 | 903 |
| | | CUCAUAUG | 2990- | | | | AUGAGGCU | 2988- | | |
| | | ACUCA | 3010_C21U_s | | | | GAAUAAC | 3010_G1A_as | | |
| AD-597925.1 | A-1146534.1 | UCGGCUUU | NM_000345.3_ | 3015-3035 | 814 | A-1146535.1 | UAACUGTU | NM_000345.3_ | 3013-3035 | 904 |
| | | ACCAAAAC | 3015- | | | | UUGGUAAA | 3013- | | |
| | | AGUUA | 3035_C21U_s | | | | GCCGACC | 3035_G1A_as | | |
| AD-597927.1 | A-1146538.1 | GGCUUUAC | NM_000345.3_ | 3017-3037 | 815 | A-1146539.1 | UUGAACTG | NM_000345.3_ | 3015-3037 | 905 |
| | | CAAAACAG | 3017- | | | | UUUUGGUA | 3015- | | |
| | | UUCAA | 3037_G21U_s | | | | AAGCCGA | 3037_C1A_as | | |
| AD-597937.1 | A-1146558.1 | AAACAGUU | NM_000345.3_ | 3027-3047 | 816 | A-1146559.1 | UAAGUGCA | NM_000345.3_ | 3025-3047 | 906 |
| | | CAGAGUGC | 3027-3047_s | | | | CUCUGAAC | 3025-3047_as | | |
| | | ACUUA | | | | | UGUUUUG | | | |
| AD-597946.1 | A-1146576.1 | AGAGUGCA | NM_000345.3_ | 3036-3056 | 817 | A-1146577.1 | UUGUGUGC | NM_000345.3_ | 3034-3056 | 907 |
| | | CUUUGGCA | 3036- | | | | CAAAGUGC | 3034- | | |
| | | CACAA | 3056_A21U_s | | | | ACUCUGA | 3056_U1A_as | | |
| AD-597972.1 | A-1146628.1 | AACAGAAC | NM_000345.3_ | 3062-3082 | 818 | A-1146629.1 | UACACATU | NM_000345.3_ | 3060-3082 | 908 |
| | | AAUCUAAU | 3062- | | | | AGAUUGUU | 3060- | | |
| | | GUGUA | 3082_G21U_s | | | | CUGUUCC | 3082_C1A_as | | |
| AD-597974.1 | A-1146632.1 | CAGAACAA | NM_000345.3_ | 3064-3084 | 819 | A-1146633.1 | UCCACACA | NM_000345.3_ | 3062-3084 | 909 |
| | | UCUAAUGU | 3064-3084_s | | | | UUAGAUUG | 3062-3084_as | | |
| | | GUGGA | | | | | UUCUGUU | | | |
| AD-597984.1 | A-1146652.1 | UAAUGUGU | NM_000345.3_ | 3074-3094 | 820 | A-1146653.1 | UGAAUACC | NM_000345.3_ | 3072-3094 | 910 |
| | | GGUUUGGU | 3074- | | | | AAACCACA | 3072- | | |
| | | AUUCA | 3094_C21U_s | | | | CAUUAGA | 3094_G1A_as | | |
| AD-597988.1 | A-1146660.1 | GUGUGGUU | NM_000345.3_ | 3078-3098 | 821 | A-1146661.1 | UCUUGGAA | NM_000345.3_ | 3076-3098 | 911 |
| | | UGGUAUUC | 3078-3098_s | | | | UACCAAAC | 3076-3098_as | | |
| | | CAAGA | | | | | CACACAU | | | |
| AD-597989.1 | A-1146662.1 | UGUGGUUU | NM_000345.3_ | 3079-3099 | 822 | A-1146663.1 | UACUUGGA | NM_000345.3_ | 3077-3099 | 912 |
| | | GGUAUUCC | 3079- | | | | AUACCAAA | 3077- | | |
| | | AAGUA | 3099_G21U_s | | | | CCACACA | 3099_C1A_as | | |
| AD-464229.1 | A-900784.1 | AUGAAAGG | NM_000345.3_ | 276-296 | 1187 | A-900785.1 | UGCCUUUG | NM_000345.3_ | 274-296 | 1279 |
| | | ACUUUCAA | 276- | | | | AAAGUCCU | 274- | | |
| | | AGGCA | 296_C21U_s | | | | UUCAUGA | 296_G1A_as | | |
| AD-464313.1 | A-900952.1 | AAAGAGGG | NM_000345.3_ | 363-383 | 1188 | A-900953.1 | UACAUAGA | NM_000345.3_ | 361-383 | 1280 |
| | | UGUUCUCU | 363-383_s | | | | GAACACCC | 361-383_as | | |
| | | AUGUA | | | | | UCUUUUG | | | |
| AD-464314.1 | A-900954.1 | AAGAGGGU | NM_000345.3_ | 364-384 | 1189 | A-900955.1 | UUACAUAG | NM_000345.3_ | 362-384 | 1281 |
| | | GUUCUCUA | 364- | | | | AGAACACC | 362- | | |
| | | UGUAA | 384_G21U_s | | | | CUCUUUU | 384_C1A_as | | |
| AD-464559.1 | A-901440.1 | UGAGGCUU | NM_000345.3_ | 629-649 | 1190 | A-901441.1 | UAAGGCAU | NM_000345.3_ | 627-649 | 1282 |
| | | AUGAAAUG | 629- | | | | UUCAUAAG | 627- | | |
| | | CCUUA | 649_C21U_s | | | | CCUCAUU | 649_G1A_as | | |
| AD-464585.1 | A-901492.1 | AAGGGUAU | NM_000345.3_ | 655-675 | 1191 | A-901493.1 | UUUCGUAG | NM_000345.3_ | 653-675 | 1283 |
| | | CAAGACUA | 655- | | | | UCUUGAUA | 653- | | |
| | | CGAAA | 675_C21U_s | | | | CCCUUCC | 675_G1A_as | | |
| AD-464586.1 | A-901494.1 | AGGGUAUC | NM_000345.3_ | 656-676 | 1192 | A-901495.1 | UGUUCGUA | NM_000345.3_ | 654-676 | 1284 |
| | | AAGACUAC | 656- | | | | GUCUUGAU | 654- | | |
| | | GAACA | 676_C21U_s | | | | ACCCUUC | 676_G1A_as | | |
| AD-464590.1 | A-901502.1 | UAUCAAGA | NM_000345.3_ | 660-680 | 1193 | A-901503.1 | UUCAGGUU | NM_000345.3_ | 658-680 | 1285 |
| | | CUACGAAC | 660-680_s | | | | CGUAGUCU | 658-680_as | | |
| | | CUGAA | | | | | UGAUACC | | | |
| AD-464592.1 | A-901506.1 | UCAAGACU | NM_000345.3_ | 662-682 | 1194 | A-901507.1 | UCUUCAGG | NM_000345.3_ | 660-682 | 1286 |
| | | ACGAACCU | 662- | | | | UUCGUAGU | 660- | | |
| | | GAAGA | 682_C21U_s | | | | CUUGAUA | 682_G1A_as | | |
| AD-464603.1 | A-901528.1 | AACCUGAA | NM_000345.3_ | 673-693 | 1195 | A-901529.1 | UUAUUUCU | NM_000345.3_ | 671-693 | 1287 |
| | | GCCUAAGA | 673-693_s | | | | UAGGCUUC | 671-693_as | | |
| | | AAUAA | | | | | AGGUUCG | | | |
| AD-464606.1 | A-901534.1 | CUGAAGCC | NM_000345.3_ | 676-696 | 1196 | A-901535.1 | UAGAUAUU | NM_000345.3_ | 674-696 | 1288 |
| | | UAAGAAAU | 676-696_s | | | | UCUUAGGC | 674-696_as | | |
| | | AUCUA | | | | | UUCAGGU | | | |
| AD-464630.1 | A-901582.1 | UCCCAGUU | NM_000345.3_ | 700-720 | 1197 | A-901583.1 | UCAGAUCU | NM_000345.3_ | 698-720 | 1289 |
| | | UCUUGAGA | 700- | | | | CAAGAAAC | 698- | | |
| | | UCUGA | 720_C21U_s | | | | UGGGAGC | 720_G1A_as | | |
| AD-464634.1 | A-901590.1 | AGUUUCUU | NM_000345.3_ | 704-724 | 1198 | A-901591.1 | UUCAGCAG | NM_000345.3_ | 702-724 | 1290 |
| | | GAGAUCUG | 704- | | | | AUCUCAAG | 702- | | |
| | | CUGAA | 724_C21U_s | | | | AAACUGG | 724_G1A_as | | |
| AD-464636.1 | A-901594.1 | UUUCUUGA | NM_000345.3_ | 706-726 | 1199 | A-901595.1 | UUGUCAGC | NM_000345.3_ | 704-726 | 1291 |
| | | GAUCUGCU | 706- | | | | AGAUCUCA | 704- | | |
| | | GACAA | 726_G21U_s | | | | AGAAACU | 726_C1A_as | | |
| AD-464694.1 | A-901710.1 | CCAGUCAU | NM_000345.3_ | 764-784 | 1200 | A-901711.1 | UUUGAGAA | NM_000345.3_ | 762-784 | 1292 |
| | | GACAUUUC | 764-784_s | | | | AUGUCAUG | 762-784_as | | |
| | | UCAAA | | | | | ACUGGGC | | | |
| AD-464742.1 | A-901806.1 | CAUCAGCA | NM_000345.3_ | 812-832 | 1201 | A-901807.1 | UUACUUCA | NM_000345.3_ | 810-832 | 1293 |
| | | GUGAUUGA | 812-832_s | | | | AUCACUGC | 810-832_as | | |
| | | AGUAA | | | | | UGAUGGA | | | |
| AD-464778.1 | A-901878.1 | UUUCACUG | NM_000345.3_ | 869-889 | 1202 | A-901879.1 | UAUGUAUU | NM_000345.3_ | 867-889 | 1294 |
| | | AAGUGAAU | 869- | | | | CACUUCAG | 867- | | |
| | | ACAUA | 889_G21U_s | | | | UGAAAGG | 889 CA_as | | |
| AD-464779.1 | A-901880.1 | UUCACUGA | NM_000345.3_ | 870-890 | 1203 | A-901881.1 | UCAUGUAU | NM_000345.3_ | 868-890 | 1295 |
| | | AGUGAAUA | 870- | | | | UCACUUCA | 868- | | |
| | | CAUGA | 890_G21U_s | | | | GUGAAAG | 890_C1A_as | | |
| AD-464782.1 | A-901886.1 | ACUGAAGU | NM_000345.3_ | 873-893 | 1204 | A-901887.1 | UUACCAUG | NM_000345.3_ | 871-893 | 1296 |
| | | GAAUACAU | 873- | | | | UAUUCACU | 871- | | |
| | | GGUAA | 893_G21U_s | | | | UCAGUGA | 893_C1A_as | | |
| AD-464813.1 | A-901948.1 | ACCUAAGU | NM_000345.3_ | 957-977 | 1205 | A-152515.1 | UUAAGUGG | NM_007308.2_ | 955-977 | 1297 |
| | | GACUACCA | 957-977_s | | | | UAGUCACU | 869-890_as | | |
| | | CUUAA | | | | | UAGGUGU | | | |
| AD-464814.1 | A-901949.1 | GUGACUAC | NM_000345.3_ | 963-983 | 1206 | A-152519.1 | UUAGAAAU | NM_007308.2_ | 961-983 | 1298 |
| | | CACUUAUU | 963-983_s | | | | AAGUGGUA | 875-896_as | | |
| | | UCUAA | | | | | GUCACUU | | | |
| AD-464815.1 | A-901950.1 | UGACUACC | NM_000345.3_ | 964-984 | 1207 | A-152535.1 | UUUAGAAA | NM_007308.2_ | 962-984 | 1299 |
| | | ACUUAUUU | 964-984 S | | | | UAAGUGGU | 876-897_as | | |
| | | CUAAA | | | | | AGUCACU | | | |
| AD-464856.1 | A-902029.1 | AAACACCU | NM_000345.3_ | 953-973 | 1208 | A-902030.1 | UUGGUAGU | NM_000345.3_ | 951-973 | 1300 |
| | | AAGUGACU | 953- | | | | CACUUAGG | 951- | | |
| | | ACCAA | 973_C21U_s | | | | UGUUUUU | 973_G1A_as | | |
| AD-464859.1 | A-902035.1 | CACCUAAG | NM_000345.3_ | 956-976 | 1209 | A-902036.1 | UAAGUGGU | NM_000345.3_ | 954-976 | 1301 |
| | | UGACUACC | 956-976_s | | | | AGUCACUU | 954-976_as | | |
| | | ACUUA | | | | | AGGUGUU | | | |
| AD-464884.1 | A-902085.1 | CUGUUGUU | NM_000345.3_ | 1005-1025 | 1210 | A-902086.1 | UUAACAAC | NM_000345.3_ | 1003-1025 | 1302 |
| | | CAGAAGUU | 1005- | | | | UUCUGAAC | 1003- | | |
| | | GUUAA | 1025_G21U_s | | | | AACAGCA | 1025_C1A_as | | |
| AD-464885.1 | A-902087.1 | UGUUGUUC | NM_000345.3_ | 1006-1026 | 1211 | A-902088.1 | UCUAACAA | NM_000345.3_ | 1004-1026 | 1303 |
| | | AGAAGUUG | 1006-1026_s | | | | CUUCUGAA | 1004-1026_as | | |
| | | UUAGA | | | | | CAACAGC | | | |
| AD-464886.1 | A-902089.1 | GUUGUUCA | NM_000345.3_ | 1007-1027 | 1212 | A-902090.1 | UACUAACA | NM_000345.3_ | 1005-1027 | 1304 |
| | | GAAGUUGU | 1007- | | | | ACUUCUGA | 1005- | | |
| | | UAGUA | 1027_G21U_s | | | | ACAACAG | 1027_C1A_as | | |
| AD-464928.1 | A-902173.1 | UUUUAAUG | NM_000345.3_ | 1063-1083 | 1213 | A-902174.1 | UCUUAGAC | NM_000345.3_ | 1061-1083 | 1305 |
| | | AUACUGUC | 1063-1083_s | | | | AGUAUCAU | 1061-1083_as | | |
| | | UAAGA | | | | | UAAAAGA | | | |
| AD-464936.1 | A-902189.1 | AUACUGUC | NM_000345.3_ | 1071-1091 | 1214 | A-902190.1 | UUCAUUAU | NM_000345.3_ | 1069-1091 | 1306 |
| | | UAAGAAUA | 1071- | | | | UCUUAGAC | 1069- | | |
| | | AUGAA | 1091_C21U_s | | | | AGUAUCA | 1091_G1A_as | | |
| AD-464977.1 | A-902268.1 | AGCAUGAA | NM_000345.3_ | 1136-1156 | 1215 | A-902269.1 | UUAGGUGC | NM_000345.3_ | 1134-1156 | 1307 |
| | | ACUAUGCA | 1136-1156_s | | | | AUAGUUUC | 1134-1156_as | | |
| | | CCUAA | | | | | AUGCUCA | | | |
| AD-464978.1 | A-902270.1 | CAUGAAAC | NM_000345.3_ | 1138-1158 | 1216 | A-902271.1 | UUAUAGGU | NM_000345.3_ | 1136-1158 | 1308 |
| | | UAUGCACC | 1138-1158_s | | | | GCAUAGUU | 1136-1158_as | | |
| | | UAUAA | | | | | UCAUGCU | | | |
| AD-465064.1 | A-902441.1 | UUUAUCCC | NM_000345.3_ | 1269-1289 | 1217 | A-902442.1 | UUUAAAGU | NM_000345.3_ | 1267-1289 | 1309 |
| | | AUCUCACU | 1269-1289_s | | | | GAGAUGGG | 1267-1289_as | | |
| | | UUAAA | | | | | AUAAAAA | | | |
| AD-465065.1 | A-902443.1 | UUAUCCCA | NM_000345.3_ | 1270-1290 | 1218 | A-902444.1 | UAUUAAAG | NM_000345.3_ | 1268-1290 | 1310 |
| | | UCUCACUU | 1270-1290_s | | | | UGAGAUGG | 1268-1290_as | | |
| | | UAAUA | | | | | GAUAAAA | | | |
| AD-465068.1 | A-902449.1 | UCCCAUCUC | NM_000345.3_ | 1273-1293 | 1219 | A-902450.1 | UAUUAUUA | NM_000345.3_ | 1271-1293 | 1311 |
| | | ACUUUAAU | 1273-1293_s | | | | AAGUGAGA | 1271-1293_as | | |
| | | AAUA | | | | | UGGGAUA | | | |
| AD-465168.1 | A-902649.1 | AAAAUGGA | NM_000345.3_ | 1399-1419 | 1220 | A-902650.1 | UUAGGGUU | NM_000345.3_ | 1397-1419 | 1312 |
| | | ACAUUAAC | 1399- | | | | AAUGUUCC | 1397- | | |
| | | CCUAA | 1419_C21U_s | | | | AUUUUCU | 1419_G1A_as | | |
| AD-465691.1 | A-903695.1 | UCUCUUUC | NM_000345.3_ | 2138-2158 | 1221 | A-903696.1 | UUAGAUCU | NM_000345.3_ | 2136-2158 | 1313 |
| | | AGGGAAGA | 2138-2158 S | | | | UCCCUGAA | 2136-2158_as | | |
| | | UCUAA | | | | | AGAGAAA | | | |
| AD-465756.1 | A-903825.1 | AAGUCACU | NM_000345.3_ | 2271-2291 | 1222 | A-903826.1 | UAUACUUU | NM_000345.3_ | 2269-2291 | 1314 |
| | | AGUAGAAA | 2271-2291_s | | | | CUACUAGU | 2269-2291_as | | |
| | | GUAUA | | | | | GACUUUU | | | |
| AD-465757.1 | A-903827.1 | AGUCACUA | NM_000345.3_ | 2272-2292 | 1223 | A-903828.1 | UUAUACUU | NM_000345.3_ | 2270-2292 | 1315 |
| | | GUAGAAAG | 2272-2292_s | | | | UCUACUAG | 2270-2292_as | | |
| | | UAUAA | | | | | UGACUUU | | | |
| AD-465760.1 | A-903833.1 | CACUAGUA | NM_000345.3_ | 2275-2295 | 1224 | A-903834.1 | UAAUUAUA | NM_000345.3_ | 2273-2295 | 1316 |
| | | GAAAGUAU | 2275-2295_s | | | | CUUUCUAC | 2273-2295_as | | |
| | | AAUUA | | | | | UAGUGAC | | | |
| AD-465784.1 | A-903881.1 | CAGAAUAU | NM_000345.3_ | 2301-2321 | 1225 | A-903882.1 | UAGCAUGU | NM_000345.3_ | 2299-2321 | 1317 |
| | | UCUAGACA | 2301-2321_s | | | | CUAGAAUA | 2299-2321_as | | |
| | | UGCUA | | | | | UUCUGUC | | | |
| AD-465785.1 | A-903883.1 | AGAAUAUU | NM_000345.3_ | 2302-2322 | 1226 | A-903884.1 | UUAGCAUG | NM_000345.3_ | 2300-2322 | 1318 |
| | | CUAGACAU | 2302- | | | | UCUAGAAU | 2300- | | |
| | | GCUAA | 2322_G21U_s | | | | AUUCUGU | 2322_C1A_as | | |
| AD-465794.1 | A-903901.1 | UAGACAUG | NM_000345.3_ | 2311-2331 | 1227 | A-903902.1 | UAUAAACU | NM_000345.3_ | 2309-2331 | 1319 |
| | | CUAGCAGU | 2311-2331_s | | | | GCUAGCAU | 2309-2331_as | | |
| | | UUAUA | | | | | GUCUAGA | | | |
| AD-465876.1 | A-904065.1 | GAUGGUUA | NM_000345.3_ | 2401-2421 | 1228 | A-904066.1 | UAAGUUUC | NM_000345.3_ | 2399-2421 | 1320 |
| | | CCAUAGAA | 2401- | | | | UAUGGUAA | 2399- | | |
| | | ACUUA | 2421_C21U_s | | | | CCAUCCU | 2421_G1A_as | | |
| AD-465918.1 | A-904149.1 | AAGCUGCA | NM_000345.3_ | 2461-2481 | 1229 | A-904150.1 | UUAAGAUG | NM_000345.3_ | 2459-2481 | 1321 |
| | | UGUGUCAU | 2461- | | | | ACACAUGC | 2459- | | |
| | | CUUAA | 2481_C21U_s | | | | AGCUUAG | 2481_G1A_as | | |
| AD-465919.1 | A-904151.1 | AGCUGCAU | NM_000345.3_ | 2462-2482 | 1230 | A-904152.1 | UGUAAGAU | NM_000345.3_ | 2460-2482 | 1322 |
| | | GUGUCAUC | 2462-2482_s | | | | GACACAUG | 2460-2482_as | | |
| | | UUACA | | | | | CAGCUUA | | | |
| AD-466320.1 | A-904953.1 | AGUCCUAG | NM_000345.3_ | 2951-2971 | 1231 | A-904954.1 | UUGCAAAA | NM_000345.3_ | 2949-2971 | 1323 |
| | | GUUUAUUU | 2951- | | | | UAAACCUA | 2949- | | |
| | | UGCAA | 2971_G21U_s | | | | GGACUGG | 2971_C1A_as | | |
| AD-466384.1 | A-905081.1 | UCGGCUUU | NM_000345.3_ | 3015-3035 | 1232 | A-905082.1 | UAACUGUU | NM_000345.3_ | 3013-3035 | 1324 |
| | | ACCAAAAC | 3015- | | | | UUGGUAAA | 3013- | | |
| | | AGUUA | 3035_C21U_s | | | | GCCGACC | 3035_G1A_as | | |
| AD-466386.1 | A-905085.1 | GGCUUUAC | NM_000345.3_ | 3017-3037 | 1233 | A-905086.1 | UUGAACUG | NM_000345.3_ | 3015-3037 | 1325 |
| | | CAAAACAG | 3017- | | | | UUUUGGUA | 3015- | | |
| | | UUCAA | 3037_G21U_s | | | | AAGCCGA | 3037_C1A_as | | |
| AD-466443.1 | A-905199.1 | UAAUGUGU | NM_000345.3_ | 3074-3094 | 1234 | A-905200.1 | UGAAUACC | NM_000345.3_ | 3072-3094 | 1326 |
| | | GGUUUGGU | 3074- | | | | AAACCACA | 3072- | | |
| | | AUUCA | 3094_C21U_s | | | | CAUUAGA | 3094_G1A_as | | |
| AD-475646.1 | A-919481.1 | AUACAUCU | NM_001042451. | 294-314 | 1235 | A-919482.1 | UAUCCAUG | NM_001042451. | 292-314 | 1327 |
| | | UUAGCCAU | 2_294- | | | | GCUAAAGA | 2_292- | | |
| | | GGAUA | 314_G21U_s | | | | UGUAUUU | 314_C1A_as | | |
| AD-475661.1 | A-919511.1 | GGAUGUGU | NM_001042451. | 310-330 | 1236 | A-919512.1 | UGUCCUUU | NM_001042451. | 308-330 | 1328 |
| | | UCAUGAAA | 2_310-330_s | | | | CAUGAACA | 2_308- | | |
| | | GGACA | | | | | CAUCCAU | 330_as | | |
| AD-475663.1 | A-919515.1 | AUGUGUUC | NM_001042451. | 312-332 | 1237 | A-919516.1 | UAAGUCCU | NM_001042451. | 310-332 | 1329 |
| | | AUGAAAGG | 2_312-332_s | | | | UUCAUGAA | 2_310- | | |
| | | ACUUA | | | | | CACAUCC | 332_as | | |
| AD-475666.1 | A-919521.1 | UGUUCAUG | NM_001042451. | 315-335 | 1238 | A-919522.1 | UUGAAAGU | NM_001042451. | 313-335 | 1330 |
| | | AAAGGACU | 2_315-335_s | | | | CCUUUCAU | 2_313- | | |
| | | UUCAA | | | | | GAACACA | 335_as | | |
| AD-475723.1 | A-919635.1 | GAGUCCUC | NM_001042451. | 414-434 | 1239 | A-919636.1 | UGGAACCU | NM_001042451. | 412-434 | 1331 |
| | | UAUGUAGG | 2_414-434_s | | | | ACAUAGAG | 2_412- | | |
| | | UUCCA | | | | | GACUCCC | 434_as | | |
| AD-475728.1 | A-919645.1 | CUCUAUGU | NM_001042451. | 419-439 | 1240 | A-919646.1 | UGUUUUGG | NM_001042451. | 417-439 | 1332 |
| | | AGGUUCCA | 2_419-439_s | | | | AACCUACA | 2_417- | | |
| | | AAACA | | | | | UAGAGGA | 439_as | | |
| AD-475761.1 | A-919709.1 | UGGUUCAU | NM_001042451. | 450-470 | 1241 | A-919710.1 | UUGUUGUC | NM_001042451. | 448-470 | 1333 |
| | | GGAGUGAC | 2_450- | | | | ACUCCAUG | 2_448- | | |
| | | AACAA | 470_G21U_s | | | | AACCACU | 470_C1A_as | | |
| AD-475765.1 | A-919717.1 | UCAUGGAG | NM_001042451. | 454-474 | 1242 | A-919718.1 | UCCACUGU | NM_001042451. | 452-474 | 1334 |
| | | UGACAACA | 2_454- | | | | UGUCACUC | 2_452- | | |
| | | GUGGA | 474_C21U_s | | | | CAUGAAC | 474_G1A_as | | |
| AD-475888.1 | A-901440.1 | UGAGGCUU | NM_000345.3_ | 629-649 | 1243 | A-919961.1 | UAAGGCAU | NM_001042451. | 627-649 | 1335 |
| | | AUGAAAUG | 629- | | | | UUCAUAAG | 2_671- | | |
| | | CCUUA | 649_C21U_s | | | | CCUCACU | 693_G1A_as | | |
| AD-475895.1 | A-919973.1 | GGAAUCCU | NM_001042451. | 638-658 | 1244 | A-919974.1 | UGGCAUGU | NM_001042451. | 636-658 | 1336 |
| | | GGAAGACA | 2_638-658_s | | | | CUUCCAGG | 2_636- | | |
| | | UGCCA | | | | | AUUCCUU | 658_as | | |
| AD-475927.1 | A-920037.1 | AGUGAGGC | NM_001042451. | 671-691 | 1245 | A-920038.1 | UGGCAUUU | NM_001042451. | 669-691 | 1337 |
| | | UUAUGAAA | 2_671-691_s | | | | CAUAAGCC | 2_669- | | |
| | | UGCCA | | | | | UCACUGC | 691_as | | |
| AD-475929.1 | A-920041.1 | AGGCUUAU | NM_001042451. | 675-695 | 1246 | A-920042.1 | UUGAAGGC | NM_001042451. | 673-695 | 1338 |
| | | GAAAUGCC | 2_675- | | | | AUUUCAUA | 2_673- | | |
| | | UUCAA | 695_G21U_s | | | | AGCCUCA | 695_C1A_as | | |
| AD-475930.1 | A-920043.1 | GGCUUAUG | NM_001042451. | 676-696 | 1247 | A-920044.1 | UCUGAAGG | NM_001042451. | 674-696 | 1339 |
| | | AAAUGCCU | 2_676-696_s | | | | CAUUUCAU | 2_674- | | |
| | | UCAGA | | | | | AAGCCUC | 696_as | | |
| AD-475941.1 | A-920064.1 | AUGCCUUC | NM_001042451. | 686-706 | 1248 | A-920065.1 | UUAGCCUU | NM_001042451. | 684-706 | 1340 |
| | | AGAGGAAG | 2_686- | | | | CCUCUGAA | 2_684- | | |
| | | GCUAA | 706_C21U_s | | | | GGCAUUU | 706_G1A_as | | |
| AD-475942.1 | A-920066.1 | UGCCUUCA | NM_001042451. | 687-707 | 1249 | A-920067.1 | UGUAGCCU | NM_001042451. | 685-707 | 1341 |
| | | GAGGAAGG | 2_687- | | | | UCCUCUGA | 2_685- | | |
| | | CUACA | 707_C21U_s | | | | AGGCAUU | 707_G1A_as | | |
| AD-475952.1 | A-920086.1 | GGAAGGCU | NM_001042451. | 697-717 | 1250 | A-920087.1 | UCAUAGUC | NM_001042451. | 695-717 | 1342 |
| | | ACCAAGAC | 2_697-717_s | | | | UUGGUAGC | 2_695- | | |
| | | UAUGA | | | | | CUUCCUC | 717_as | | |
| AD-475953.1 | A-920088.1 | GAAGGCUA | NM_001042451. | 698-718 | 1251 | A-920089.1 | UUCAUAGU | NM_001042451. | 696-718 | 1343 |
| | | CCAAGACU | 2_698- | | | | CUUGGUAG | 2_696- | | |
| | | AUGAA | 718_G21U_s | | | | CCUUCCU | 718_C1A_as | | |
| AD-475954.1 | A-920090.1 | AAGGCUAC | NM_001042451. | 699-719 | 1252 | A-920091.1 | UCUCAUAG | NM_001042451. | 697-719 | 1344 |
| | | CAAGACUA | 2_699- | | | | UCUUGGUA | 2_697- | | |
| | | UGAGA | 719_C21U_s | | | | GCCUUCC | 719_G1A_as | | |
| AD-475955.1 | A-920092.1 | AGGCUACC | NM_001042451. | 700-720 | 1253 | A-920093.1 | UGCUCAUA | NM_001042451. | 698-720 | 1345 |
| | | AAGACUAU | 2_700- | | | | GUCUUGGU | 2_698- | | |
| | | GAGCA | 720_C21U_s | | | | AGCCUUC | 720_G1A_as | | |
| AD-475966.1 | A-920114.1 | ACUAUGAG | NM_001042451. | 711-731 | 1254 | A-920115.1 | UUUAGGCU | NM_001042451. | 709-731 | 1346 |
| | | CCUGAAGC | 2_711- | | | | UCAGGCUC | 2_709- | | |
| | | CUAAA | 731_G21U_s | | | | AUAGUCU | 731_C1A_as | | |
| AD-476025.1 | A-920230.1 | GCUCUUCC | NM_001042451. | 769-789 | 1255 | A-920231.1 | UCUUGUAC | NM_001042451. | 767-789 | 1347 |
| | | AUGGCGUA | 2_769-789_s | | | | GCCAUGGA | 2_767- | | |
| | | CAAGA | | | | | AGAGCAG | 789_as | | |
| AD-476026.1 | A-920232.1 | CUCUUCCA | NM_001042451. | 770-790 | 1256 | A-920233.1 | UACUUGUA | NM_001042451. | 768-790 | 1348 |
| | | UGGCGUAC | 2_770- | | | | CGCCAUGG | 2_768- | | |
| | | AAGUA | 790_G21U_s | | | | AAGAGCA | 790_C1A_as | | |
| AD-476027.1 | A-920234.1 | UCUUCCAU | NM_001042451. | 771-791 | 1257 | A-920235.1 | UCACUUGU | NM_001042451. | 769-791 | 1349 |
| | | GGCGUACA | 2_771- | | | | ACGCCAUG | 2_769- | | |
| | | AGUGA | 791_C21U_s | | | | GAAGAGC | 791_G1A_as | | |
| AD-476029.1 | A-920238.1 | UUCCAUGG | NM_001042451. | 773-793 | 1258 | A-920239.1 | UAGCACUU | NM_001042451. | 771-793 | 1350 |
| | | CGUACAAG | 2_773- | | | | GUACGCCA | 2_771- | | |
| | | UGCUA | 793_C21U_s | | | | UGGAAGA | 793_G1A_as | | |
| AD-476030.1 | A-920240.1 | UCCAUGGC | NM_001042451. | 774-794 | 1259 | A-920241.1 | UGAGCACU | NM_001042451. | 772-794 | 1351 |
| | | GUACAAGU | 2_774-794_s | | | | UGUACGCC | 2_772- | | |
| | | GCUCA | | | | | AUGGAAG | 794_as | | |
| AD-476032.1 | A-920244.1 | CAUGGCGU | NM_001042451. | 776-796 | 1260 | A-920245.1 | UCUGAGCA | NM_001042451. | 774-796 | 1352 |
| | | ACAAGUGC | 2_776-796_s | | | | CUUGUACG | 2_774- | | |
| | | UCAGA | | | | | CCAUGGA | 796_as | | |
| AD-476041.1 | A-920262.1 | UGUGCCCA | NM_001042451. | 802-822 | 1261 | A-920263.1 | UAAAGGUC | NM_001042451. | 800-822 | 1353 |
| | | GUCAUGAC | 2_802-822_s | | | | AUGACUGG | 2_800- | | |
| | | CUUUA | | | | | GCACAUU | 822_as | | |
| AD-476058.1 | A-920291.1 | ACCUUUUC | NM_001042451. | 816-836 | 1262 | A-920292.1 | UGUACAGC | NM_001042451. | 814-836 | 1354 |
| | | UCAAAGCU | 2_816-836_s | | | | UUUGAGAA | 2_814- | | |
| | | GUACA | | | | | AAGGUCA | 836_as | | |
| AD-476061.1 | A-920297.1 | UUUUCUCA | NM_001042451. | 819-839 | 1263 | A-920298.1 | UACUGUAC | NM_001042451. | 817-839 | 1355 |
| | | AAGCUGUA | 2_819- | | | | AGCUUUGA | 2_817- | | |
| | | CAGUA | 839_G21U_s | | | | GAAAAGG | 839_C1A_as | | |
| AD-476089.1 | A-920353.1 | UCUUCCAU | NM_001042451. | 850-870 | 1264 | A-920354.1 | UCGAUCAC | NM_001042451. | 848-870 | 1356 |
| | | CAGCAGUG | 2_850- | | | | UGCUGAUG | 2_848- | | |
| | | AUCGA | 870_G21U_s | | | | GAAGACU | 870_C1A_as | | |
| AD-476146.1 | A-920466.1 | CUGUGGAU | NM_001042451. | 947-967 | 1265 | A-920467.1 | UAGCCACA | NM_001042451. | 945-967 | 1357 |
| | | AUUGUUGU | 2_947-967_s | | | | ACAAUAUC | 2_945- | | |
| | | GGCUA | | | | | CACAGCA | 967_as | | |
| AD-476152.1 | A-902027.1 | AAAACACC | NM_000345.3_ | 952-972 | 1266 | A-920475.1 | UGGUAGUC | NM_001042451. | 950-972 | 1358 |
| | | UAAGUGAC | 952-972_s | | | | ACUUAGGU | 2_992- | | |
| | | UACCA | | | | | GUUUUAA | 1014_as | | |
| AD-476192.1 | A-920548.1 | GAAACUUA | NM_001042451. | 987-1007 | 1267 | A-920549.1 | UACUUAGG | NM_001042451. | 985-1007 | 1359 |
| | | AAACACCU | 2_987- | | | | UGUUUUAA | 2_985- | | |
| | | AAGUA | 1007_G21U_s | | | | GUUUCUU | 1007_C1A_as | | |
| AD-476198.1 | A-920560.1 | UAAAACAC | NM_001042451. | 993-1013 | 1268 | A-920561.1 | UGUAGUCA | NM_001042451. | 991-1013 | 1360 |
| | | CUAAGUGA | 2_993- | | | | CUUAGGUG | 2_991- | | |
| | | CUACA | 1013_C21U_s | | | | UUUUAAG | 1013_G1A_as | | |
| AD-476306.1 | A-920771.1 | AUUAUGUG | NM_001042451. | 1155-1175 | 1269 | A-920772.1 | UUAGUCUC | NM_001042451. | 1153-1175 | 1361 |
| | | AGCAUGAG | 2_1155- | | | | AUGCUCAC | 2_1153- | | |
| | | ACUAA | 1175_s | | | | AUAAUUU | 1175_as | | |
| AD-476309.1 | A-920777.1 | AUGUGAGC | NM_001042451. | 1158-1178 | 1270 | A-920778.1 | UGCAUAGU | NM_001042451. | 1156-1178 | 1362 |
| | | AUGAGACU | 2_1158- | | | | CUCAUGCU | 2_1156- | | |
| | | AUGCA | 1178_s | | | | CACAUAA | 1178_as | | |
| AD-476311.1 | A-920781.1 | GUGAGCAU | NM_001042451. | 1160-1180 | 1271 | A-920782.1 | UGUGCAUA | NM_001042451. | 1158-1180 | 1363 |
| | | GAGACUAU | 2_1160- | | | | GUCUCAUG | 2_1158- | | |
| | | GCACA | 1180_C21U_s | | | | CUCACAU | 1180_G1A_as | | |
| AD-476312.1 | A-920783.1 | UGAGCAUG | NM_001042451. | 1161-1181 | 1272 | A-920784.1 | UGGUGCAU | NM_001042451. | 1159-1181 | 1364 |
| | | AGACUAUG | 2_1161- | | | | AGUCUCAU | 2_1159- | | |
| | | CACCA | 1181_s | | | | GCUCACA | 1181_as | | |
| AD-476313.1 | A-920785.1 | GAGCAUGA | NM_001042451. | 1162-1182 | 1273 | A-920786.1 | UAGGUGCA | NM_001042451. | 1160-1182 | 1365 |
| | | GACUAUGC | 2_ 1162- | | | | UAGUCUCA | 2_1160- | | |
| | | ACCUA | 1182_s | | | | UGCUCAC | 1182_as | | |
| AD-476316.1 | A-920789.1 | AGCAUGAG | NM_001042451. | 1163-1183 | 1274 | A-920790.1 | UUAGGUGC | NM_001042451. | 1161-1183 | 1366 |
| | | ACUAUGCA | 2_1163- | | | | AUAGUCUC | 2_1161- | | |
| | | CCUAA | 1183_s | | | | AUGCUCA | 1183_as | | |
| AD-476317.1 | A-920791.1 | GCAUGAGA | NM_001042451. | 1164-1184 | 1275 | A-920792.1 | UAUAGGUG | NM_001042451. | 1162-1184 | 1367 |
| | | CUAUGCAC | 2_1164- | | | | CAUAGUCU | 2_1162- | | |
| | | CUAUA | 1184_s | | | | CAUGCUC | 1184_as | | |
| AD-476320.1 | A-920797.1 | UGAGACUA | NM_001042451. | 1167-1187 | 1276 | A-920798.1 | UUUUAUAG | NM_001042451. | 1165-1187 | 1368 |
| | | UGCACCUA | 2_1167- | | | | GUGCAUAG | 2_1165- | | |
| | | UAAAA | 1187_s | | | | UCUCAUG | 1187_as | | |
| AD-476321.1 | A-920799.1 | GAGACUAU | NM_001042451. | 1168-1188 | 1277 | A-920800.1 | UAUUUAUA | NM_001042451. | 1166-1188 | 1369 |
| | | GCACCUAU | 2_1168- | | | | GGUGCAUA | 2_1166- | | |
| | | AAAUA | 1188_s | | | | GUCUCAU | 1188_as | | |
| AD-476344.1 | A-920845.1 | AUGUGUUU | NM_001042451. | 1216-1236 | 1278 | A-920846.1 | UCACAAGU | NM_001042451. | 1214-1236 | 1370 |
| | | UAUUAACU | 2_1216- | | | | UAAUAAAA | 2_1214- | | |
| | | UGUGA | 1236_s | | | | CACAUCA | 1236_as | | |
| AD-595768.1 | A-1142220.1 | CAUGAAAG | NM_000345.3_ | 275-295 | 1628 | A-1142221.1 | UCCUUUGA | NM_000345.3_ | 273-295 | 1717 |
| | | GACUUUCA | 275- | | | | AAGUCCUU | 273- | | |
| | | AAGGA | 295_C21U_s | | | | UCAUGAA | 295_G1A_as | | |
| AD-595769.2 | A-1142222.1 | AUGAAAGG | NM_000345.3_ | 276-296 | 1629 | A-1142223.1 | UGCCUUTG | NM_000345.3_ | 274-296 | 1718 |
| | | ACUUUCAA | 276- | | | | AAAGUCCU | 274- | | |
| | | AGGCA | 296_C21U_s | | | | UUCAUGA | 296_G1A_as | | |
| AD-595770.1 | A-1142224.1 | UGAAAGGA | NM_000345.3_ | 277-297 | 1630 | A-1142225.1 | UGGCCUTU | NM_000345.3_ | 275-297 | 1719 |
| | | CUUUCAAA | 277- | | | | GAAAGUCC | 275- | | |
| | | GGCCA | 297_A21U_s | | | | UUUCAUG | 297_U1A_as | | |
| AD-595771.1 | A-1142226.1 | GAAAGGAC | NM_000345.3_ | 278-298 | 1631 | A-1142227.1 | UUGGCCTU | NM_000345.3_ | 276-298 | 1720 |
| | | UUUCAAAG | 278- | | | | UGAAAGUC | 276- | | |
| | | GCCAA | 298_A21U_s | | | | CUUUCAU | 298_U1A_as | | |
| AD-595772.1 | A-1142228.1 | AAAGGACU | NM_000345.3_ | 279-299 | 1632 | A-1142229.1 | UUUGGCCU | NM_000345.3_ | 277-299 | 1721 |
| | | UUCAAAGG | 279- | | | | UUGAAAGU | 277- | | |
| | | CCAAA | 299_G21U_s | | | | CCUUUCA | 299_C1A_as | | |
| AD-595773.1 | A-1142230.1 | AAGGACUU | NM_000345.3_ | 280-300 | 1633 | A-1142231.1 | UCUUGGCC | NM_000345.3_ | 278-300 | 1722 |
| | | UCAAAGGC | 280- | | | | UUUGAAAG | 278- | | |
| | | CAAGA | 300_G21U_s | | | | UCCUUUC | 300_C1A_as | | |
| AD-595774.1 | A-1142232.1 | AGGACUUU | NM_000345.3_ | 281-301 | 1634 | A-1142233.1 | UCCUUGGC | NM_000345.3_ | 279-301 | 1723 |
| | | CAAAGGCC | 281- | | | | CUUUGAAA | 279- | | |
| | | AAGGA | 301_A21U_s | | | | GUCCUUU | 301_U1A_as | | |
| AD-595926.2 | A-1142536.1 | AAGACCAA | NM_000345.3_ | 435-455 | 1635 | A-1142537.1 | UGUCACTU | NM_000345.3_ | 433-455 | 1724 |
| | | AGAGCAAG | 435- | | | | GCUCUUUG | 433- | | |
| | | UGACA | 455_A21U_s | | | | GUCUUCU | 455_U1A_as | | |
| AD-595933.1 | A-1142550.1 | AAGAGCAA | NM_000345.3_ | 442-462 | 1636 | A-1142551.1 | UAACAUTU | NM_000345.3_ | 440-462 | 1725 |
| | | GUGACAAA | 442- | | | | GUCACUUG | 440- | | |
| | | UGUUA | 462_G21U_s | | | | CUCUUUG | 462_C1A_as | | |
| AD-595935.1 | A-1142554.1 | GAGCAAGU | NM_000345.3_ | 444-464 | 1637 | A-1142555.1 | UCCAACAU | NM_000345.3_ | 442-464 | 1726 |
| | | GACAAAUG | 444- | | | | UUGUCACU | 442- | | |
| | | UUGGA | 464_A21U_s | | | | UGCUCUU | 464_U1A_as | | |
| AD-595936.1 | A-1142556.1 | AGCAAGUG | NM_000345.3_ | 445-465 | 1638 | A-1142557.1 | UUCCAACA | NM_000345.3_ | 443-465 | 1727 |
| | | ACAAAUGU | 445- | | | | UUUGUCAC | 443- | | |
| | | UGGAA | 465_G21U_s | | | | UUGCUCU | 465_C1A_as | | |
| AD-595937.1 | A-1142558.1 | GCAAGUGA | NM_000345.3_ | 446-466 | 1639 | A-1142559.1 | UCUCCAAC | NM_000345.3_ | 444-466 | 1728 |
| | | CAAAUGUU | 446- | | | | AUUUGUCA | 444- | | |
| | | GGAGA | 466_G21U_s | | | | CUUGCUC | 466_C1A_as | | |
| AD-595938.1 | A-1142560.1 | CAAGUGAC | NM_000345.3_ | 447-467 | 1640 | A-1142561.1 | UCCUCCAAC | NM_000345.3_ | 445-467 | 1729 |
| | | AAAUGUUG | 447- | | | | AUUUGUCA | 445- | | |
| | | GAGGA | 467_A21U_s | | | | CUUGCU | 467_U1A_as | | |
| AD-596098.1 | A-1142880.1 | AAUGAGGC | NM_000345.3_ | 627-647 | 1641 | A-1142881.1 | UGGCAUTU | NM_000345.3_ | 625-647 | 1730 |
| | | UUAUGAAA | 627-647_s | | | | CAUAAGCC | 625-647_as | | |
| | | UGCCA | | | | | UCAUUGU | | | |
| AD-596099.1 | A-1142882.1 | AUGAGGCU | NM_000345.3_ | 628-648 | 1642 | A-1142883.1 | UAGGCATU | NM_000345.3_ | 626-648 | 1731 |
| | | UAUGAAAU | 628-648_s | | | | UCAUAAGC | 626-648_as | | |
| | | GCCUA | | | | | CUCAUUG | | | |
| AD-596100.2 | A-1142884.1 | UGAGGCUU | NM_000345.3_ | 629-649 | 1643 | A-1142885.1 | UAAGGCAU | NM_000345.3_ | 627-649 | 1732 |
| | | AUGAAAUG | 629- | | | | UUCAUAAG | 627- | | |
| | | CCUUA | 649_C21U_s | | | | CCUCAUU | 649_G1A_as | | |
| AD-596101.1 | A-1142886.1 | GAGGCUUA | NM_000345.3_ | 630-650 | 1644 | A-1142887.1 | UGAAGGCA | NM_000345.3_ | 628-650 | 1733 |
| | | UGAAAUGC | 630-650_s | | | | UUUCAUAA | 628-650_as | | |
| | | CUUCA | | | | | GCCUCAU | | | |
| AD-596215.2 | A-1143114.1 | AGUGCUCA | NM_000345.3_ | 744-764 | 1645 | A-1143115.1 | UGCACATU | NM_000345.3_ | 742-764 | 1734 |
| | | GUUCCAAU | 744- | | | | GGAACUGA | 742- | | |
| | | GUGCA | 764_C21U_s | | | | GCACUUG | 764_G1A_as | | |
| AD-596217.1 | A-1143118.1 | UGCUCAGU | NM_000345.3_ | 746-766 | 1646 | A-1143119.1 | UGGGCACA | NM_000345.3_ | 744-766 | 1735 |
| | | UCCAAUGU | 746- | | | | UUGGAACU | 744- | | |
| | | GCCCA | 766_A21U_s | | | | GAGCACU | 766_U1A_as | | |
| AD-596276.1 | A-1143236.1 | AGUCUUCC | NM_000345.3_ | 805-825 | 1647 | A-1143237.1 | UAUCACTGC | NM_000345.3_ | 803-825 | 1736 |
| | | AUCAGCAG | 805-825_s | | | | UGAUGGAA | 803-825_as | | |
| | | UGAUA | | | | | GACUUC | | | |
| AD-596326.2 | A-1143336.1 | GAAGUGAA | NM_000345.3_ | 876-896 | 1648 | A-1143337.1 | UUGCUACC | NM_000345.3_ | 874-896 | 1737 |
| | | UACAUGGU | 876- | | | | AUGUAUUC | 874- | | |
| | | AGCAA | 896_G21U_s | | | | ACUUCAG | 896_C1A_as | | |
| AD-596328.1 | A-1143340.1 | AGUGAAUA | NM_000345.3_ | 878-898 | 1649 | A-1143341.1 | UCCUGCTAC | NM_000345.3_ | 876-898 | 1738 |
| | | CAUGGUAG | 878- | | | | CAUGUAUU | 876- | | |
| | | CAGGA | 898_G21U_s | | | | CACUUC | 898_C1A_as | | |
| AD-596390.2 | A-1143464.1 | AAAAACAC | NM_000345.3_ | 951-971 | 1650 | A-1143465.1 | UGUAGUCA | NM_000345.3_ | 949-971 | 1739 |
| | | CUAAGUGA | 951- | | | | CUUAGGUG | 949- | | |
| | | CUACA | 971_C21U_s | | | | UUUUUAA | 971_G1A_as | | |
| AD-596391.2 | A-1143466.1 | AAAACACC | NM_000345.3_ | 952-972 | 1651 | A-1143467.1 | UGGUAGTC | NM_000345.3_ | 950-972 | 1740 |
| | | UAAGUGAC | 952- | | | | ACUUAGGU | 950- | | |
| | | UACCA | 972_A21U_s | | | | GUUUUUA | 972_U1A_as | | |
| AD-596392.2 | A-1143468.1 | AAACACCU | NM_000345.3_ | 953-973 | 1652 | A-1143469.1 | UUGGUAGU | NM_000345.3_ | 951-973 | 1741 |
| | | AAGUGACU | 953- | | | | CACUUAGG | 951- | | |
| | | ACCAA | 973_C21U_s | | | | UGUUUUU | 973_G1A_as | | |
| AD-596393.1 | A-1143470.1 | AACACCUA | NM_000345.3_ | 954-974 | 1653 | A-1143471.1 | UGUGGUAG | NM_000345.3_ | 952-974 | 1742 |
| | | AGUGACUA | 954-974_s | | | | UCACUUAG | 952-974_as | | |
| | | CCACA | | | | | GUGUUUU | | | |
| AD-596394.1 | A-1143472.1 | ACACCUAA | NM_000345.3_ | 955-975 | 1654 | A-1143473.1 | UAGUGGTA | NM_000345.3_ | 953-975 | 1743 |
| | | GUGACUAC | 955-975_s | | | | GUCACUUA | 953-975_as | | |
| | | CACUA | | | | | GGUGUUU | | | |
| AD-596395.1 | A-1143474.1 | CACCUAAG | NM_000345.3_ | 956-976 | 1655 | A-1143475.1 | UAAGUGGU | NM_000345.3_ | 954-976 | 1744 |
| | | UGACUACC | 956- | | | | AGUCACUU | 954- | | |
| | | ACUUA | 976_A21U_s | | | | AGGUGUU | 976_U1A_as | | |
| AD-596396.2 | A-1143476.1 | ACCUAAGU | NM_000345.3_ | 957-977 | 1656 | A-1143477.1 | UUAAGUGG | NM_000345.3_ | 955-977 | 1745 |
| | | GACUACCA | 957-977_s | | | | UAGUCACU | 955-977_as | | |
| | | CUUAA | | | | | UAGGUGU | | | |
| AD-596397.1 | A-1143478.1 | CCUAAGUG | NM_000345.3_ | 958-978 | 1657 | A-1143479.1 | UAUAAGTG | NM_000345.3_ | 956-978 | 1746 |
| | | ACUACCAC | 958-978_s | | | | GUAGUCAC | 956-978_as | | |
| | | UUAUA | | | | | UUAGGUG | | | |
| AD-596398.1 | A-1143480.1 | CUAAGUGA | NM_000345.3_ | 959-979 | 1658 | A-1143481.1 | UAAUAAGU | NM_000345.3_ | 957-979 | 1747 |
| | | CUACCACU | 959-979_s | | | | GGUAGUCA | 957-979_as | | |
| | | UAUUA | | | | | CUUAGGU | | | |
| AD-596401.1 | A-1143486.1 | AGUGACUA | NM_000345.3_ | 962-982 | 1659 | A-1143487.1 | UAGAAATA | NM_000345.3_ | 960-982 | 1748 |
| | | CCACUUAU | 962- | | | | AGUGGUAG | 960- | | |
| | | UUCUA | 982_A21U_s | | | | UCACUUA | 982_U1A_as | | |
| AD-596402.2 | A-1143488.1 | GUGACUAC | NM_000345.3_ | 963-983 | 1660 | A-1143489.1 | UUAGAAAU | NM_000345.3_ | 961-983 | 1749 |
| | | CACUUAUU | 963- | | | | AAGUGGUA | 961- | | |
| | | UCUAA | 983_A21U_s | | | | GUCACUU | 983_U1A_as | | |
| AD-596403.1 | A-1143490.1 | UGACUACC | NM_000345.3_ | 964-984 | 1661 | A-1143491.1 | UUUAGAAA | NM_000345.3_ | 962-984 | 1750 |
| | | ACUUAUUU | 964- | | | | UAAGUGGU | 962- | | |
| | | CUAAA | 984_A21U_s | | | | AGUCACU | 984_U1A_as | | |
| AD-596521.1 | A-1143726.1 | AAACUAUG | NM_000345.3_ | 1142-1162 | 1662 | A-1143727.1 | UUAUUUAU | NM_000345.3_ | 1140-1162 | 1751 |
| | | CACCUAUA | 1142- | | | | AGGUGCAU | 1140- | | |
| | | AAUAA | 1162_C21U_s | | | | AGUUUCA | 1162_G1A_as | | |
| AD-596564.1 | A-1143812.1 | UUGUGUUU | NM_000345.3_ | 1204-1224 | 1663 | A-1143813.1 | UCCAUUTA | NM_000345.3_ | 1202-1224 | 1752 |
| | | GUAUAUAA | 1204-1224_s | | | | UAUACAAA | 1202-1224_as | | |
| | | AUGGA | | | | | CACAAGU | | | |
| AD-689314.1 | A-1142220.1 | CAUGAAAG | NM_000345.3_ | 275-295 | 1664 | A-900783.1 | UCCUUUGA | NM_000345.3_ | 273-295 | 1753 |
| | | GACUUUCA | 275- | | | | AAGUCCUU | 273- | | |
| | | AAGGA | 295_C21U_s | | | | UCAUGAA | 295_G1A_as | | |
| AD-689315.1 | A-1142222.1 | AUGAAAGG | NM_000345.3_ | 276-296 | 1665 | A-900785.1 | UGCCUUUG | NM_000345.3_ | 274-296 | 1754 |
| | | ACUUUCAA | 276- | | | | AAAGUCCU | 274- | | |
| | | AGGCA | 296_C21U_s | | | | UUCAUGA | 296_G1A_as | | |
| AD-689316.1 | A-1142224.1 | UGAAAGGA | NM_000345.3_ | 277-297 | 1666 | A-900787.1 | UGGCCUUU | NM_000345.3_ | 275-297 | 1755 |
| | | CUUUCAAA | 277- | | | | GAAAGUCC | 275-297_as | | |
| | | GGCCA | 297_A21U_s | | | | UUUCAUG | | | |
| AD-689317.1 | A-1142226.1 | GAAAGGAC | NM_000345.3_ | 278-298 | 1667 | A-900789.1 | UUGGCCUU | NM_000345.3_ | 276-298 | 1756 |
| | | UUUCAAAG | 278- | | | | UGAAAGUC | 276-298_as | | |
| | | GCCAA | 298_A21U_s | | | | CUUUCAU | | | |
| AD-689318.1 | A-1142228.1 | AAAGGACU | NM_000345.3_ | 279-299 | 1668 | A-152531.1 | UUUGGCCU | NM_007308.2_ | 277-299 | 1757 |
| | | UUCAAAGG | 279- | | | | UUGAAAGU | 275- | | |
| | | CCAAA | 299_G21U_s | | | | CCUUUCA | 296_G21A_as | | |
| AD-689319.1 | A-1142230.1 | AAGGACUU | NM_000345.3_ | 280-300 | 1669 | A-900791.1 | UCUUGGCC | NM_000345.3_ | 278-300 | 1758 |
| | | UCAAAGGC | 280- | | | | UUUGAAAG | 278- | | |
| | | CAAGA | 300_G21U_s | | | | UCCUUUC | 300_C1A_as | | |
| AD-689320.1 | A-1142232.1 | AGGACUUU | NM_000345.3_ | 281-301 | 1670 | A-900793.1 | UCCUUGGC | NM_000345.3_ | 279-301 | 1759 |
| | | CAAAGGCC | 281- | | | | CUUUGAAA | 279-301_as | | |
| | | AAGGA | 301_A21U_s | | | | GUCCUUU | | | |
| AD-689452.1 | A-1142536.1 | AAGACCAA | NM_000345.3_ | 435-455 | 1671 | A-901101.1 | UGUCACUU | NM_000345.3_ | 433-455 | 1760 |
| | | AGAGCAAG | 435- | | | | GCUCUUUG | 433-455_as | | |
| | | UGACA | 455_A21U_s | | | | GUCUUCU | | | |
| AD-689459.1 | A-1142550.1 | AAGAGCAA | NM_000345.3_ | 442-462 | 1672 | A-901109.1 | UAACAUUU | NM_000345.3_ | 440-462 | 1761 |
| | | GUGACAAA | 442- | | | | GUCACUUG | 440- | | |
| | | UGUUA | 462_G21U_s | | | | CUCUUUG | 462_C1A_as | | |
| AD-689461.1 | A-1142554.1 | GAGCAAGU | NM_000345.3_ | 444-464 | 1673 | A-152527.1 | UCCAACAU | NM_007308.2_ | 442-464 | 1762 |
| | | GACAAAUG | 444- | | | | UUGUCACU | 440-461_as | | |
| | | UUGGA | 464_A21U_s | | | | UGCUCUU | | | |
| AD-689462.1 | A-1142556.1 | AGCAAGUG | NM_000345.3_ | 445-465 | 1674 | A-901113.1 | UUCCAACA | NM_000345.3_ | 443-465 | 1763 |
| | | ACAAAUGU | 445- | | | | UUUGUCAC | 443- | | |
| | | UGGAA | 465_G21U_s | | | | UUGCUCU | 465_C1A_as | | |
| AD-689463.1 | A-1142558.1 | GCAAGUGA | NM_000345.3_ | 446-466 | 1675 | A-901115.1 | UCUCCAAC | NM_000345.3_ | 444-466 | 1764 |
| | | CAAAUGUU | 446- | | | | AUUUGUCA | 444- | | |
| | | GGAGA | 466_G21U_s | | | | CUUGCUC | 466_C1A_as | | |
| AD-689464.1 | A-1142560.1 | CAAGUGAC | NM_000345.3_ | 447-467 | 1676 | A-901117.1 | UCCUCCAAC | NM_000345.3_ | 445-467 | 1765 |
| | | AAAUGUUG | 447- | | | | AUUUGUCA | 445-467_as | | |
| | | GAGGA | 467_A21U_s | | | | CUUGCU | | | |
| AD-689615.1 | A-1142880.1 | AAUGAGGC | NM_000345.3_ | 627-647 | 1677 | A-901437.1 | UGGCAUUU | NM_000345.3_ | 625-647 | 1766 |
| | | UUAUGAAA | 627-647_s | | | | CAUAAGCC | 625-647_as | | |
| | | UGCCA | | | | | UCAUUGU | | | |
| AD-689616.1 | A-1142882.1 | AUGAGGCU | NM_000345.3_ | 628-648 | 1678 | A-901439.1 | UAGGCAUU | NM_000345.3_ | 626-648 | 1767 |
| | | UAUGAAAU | 628-648_s | | | | UCAUAAGC | 626-648_as | | |
| | | GCCUA | | | | | CUCAUUG | | | |
| AD-689617.1 | A-1142884.1 | UGAGGCUU | NM_000345.3_ | 629-649 | 1679 | A-901441.1 | UAAGGCAU | NM_000345.3_ | 627-649 | 1768 |
| | | AUGAAAUG | 629- | | | | UUCAUAAG | 627- | | |
| | | CCUUA | 649_C21U_s | | | | CCUCAUU | 649_G1A_as | | |
| AD-689618.1 | A-1142886.1 | GAGGCUUA | NM_000345.3_ | 630-650 | 1680 | A-901443.1 | UGAAGGCA | NM_000345.3_ | 628-650 | 1769 |
| | | UGAAAUGC | 630-650_s | | | | UUUCAUAA | 628-650_as | | |
| | | CUUCA | | | | | GCCUCAU | | | |
| AD-689747.1 | A-1143102.1 | UGUACAAG | NM_000345.3_ | 738-758 | 1681 | A-1316021.1 | UUGGAACU | XM_005555420. | 736-758 | 1770 |
| | | UGCUCAGU | 738- | | | | GAGCACUU | 2_905- | | |
| | | UCCAA | 758_A21U_s | | | | GUACAAG | 927_as | | |
| AD-689748.1 | A-1143104.1 | GUACAAGU | NM_000345.3_ | 739-759 | 1682 | A-1316022.1 | UUUGGAAC | XM_005555420. | 737-759 | 1771 |
| | | GCUCAGUU | 739-759_s | | | | UGAGCACU | 2_906- | | |
| | | CCAAA | | | | | UGUACAA | 928_as | | |
| AD-689753.1 | A-1143114.1 | AGUGCUCA | NM_000345.3_ | 744-764 | 1683 | A-901671.1 | UGCACAUU | NM_000345.3_ | 742-764 | 1772 |
| | | GUUCCAAU | 744- | | | | GGAACUGA | 742- | | |
| | | GUGCA | 764_C21U_s | | | | GCACUUG | 764_G1A_as | | |
| AD-689755.1 | A-1143118.1 | UGCUCAGU | NM_000345.3_ | 746-766 | 1684 | A-901675.1 | UGGGCACA | NM_000345.3_ | 744-766 | 1773 |
| | | UCCAAUGU | 746- | | | | UUGGAACU | 744-766_as | | |
| | | GCCCA | 766_A21U_s | | | | GAGCACU | | | |
| AD-689786.1 | A-1143232.1 | GAAGUCUU | NM_000345.3_ | 803-823 | 1685 | A-1316023.1 | UCACUGCU | XM_005555420. | 801-823 | 1774 |
| | | CCAUCAGC | 803- | | | | GAUGGAAG | 2_970- | | |
| | | AGUGA | 823_A21U_s | | | | ACUUCAA | 992_as | | |
| AD-689787.1 | A-1143234.1 | AAGUCUUC | NM_000345.3_ | 804-824 | 1686 | A-1316024.1 | UUCACUGC | XM_005555420. | 802-824 | 1775 |
| | | CAUCAGCA | 804-824_s | | | | UGAUGGAA | 2_971- | | |
| | | GUGAA | | | | | GACUUCA | 993_as | | |
| AD-689788.1 | A-1143236.1 | AGUCUUCC | NM_000345.3_ | 805-825 | 1687 | A-901793.1 | UAUCACUG | NM_000345.3_ | 803-825 | 1776 |
| | | AUCAGCAG | 805-825_s | | | | CUGAUGGA | 803-825_as | | |
| | | UGAUA | | | | | AGACUUC | | | |
| AD-689835.1 | A-1143336.1 | GAAGUGAA | NM_000345.3_ | 876-896 | 1688 | A-901893.1 | UUGCUACC | NM_000345.3_ | 874-896 | 1777 |
| | | UACAUGGU | 876- | | | | AUGUAUUC | 874- | | |
| | | AGCAA | 896_G21U_s | | | | ACUUCAG | 896_C1A_as | | |
| AD-689907.1 | A-1316093.1 | UGAAGUCU | XM_00555542 | 971-991 | 1689 | A-1316094.1 | UACUGCUG | XM_005555420. | 969-991 | 1778 |
| | | UCCAUCAG | 0.2_971- | | | | AUGGAAGA | 2_969- | | |
| | | CAGUA | 991_G21A_s | | | | CUUCAAA | 991_C1U_as | | |
| AD-689925.1 | A-1143462.1 | UAAAAACA | NM_000345.3_ | 950-970 | 1690 | A-1316128.1 | UUAGUCAC | XM_005555420. | 948-970 | 1779 |
| | | CCUAAGUG | 950- | | | | UUAGGUGU | 2_1117- | | |
| | | ACUAA | 970_C21U_s | | | | UUUUAAA | 1139_G1U_as | | |
| AD-689926.1 | A-1143464.1 | AAAAACAC | NM_000345.3_ | 951-971 | 1691 | A-902026.1 | UGUAGUCA | NM_000345.3_ | 949-971 | 1780 |
| | | CUAAGUGA | 951- | | | | CUUAGGUG | 949- | | |
| | | CUACA | 971_C21U_s | | | | UUUUUAA | 971_G1A_as | | |
| AD-689927.1 | A-1143466.1 | AAAACACC | NM_000345.3_ | 952-972 | 1692 | A-902028.1 | UGGUAGUC | NM_000345.3_ | 950-972 | 1781 |
| | | UAAGUGAC | 952- | | | | ACUUAGGU | 950-972_as | | |
| | | UACCA | 972_A21U_s | | | | GUUUUUA | | | |
| AD-689928.1 | A-1143468.1 | AAACACCU | NM_000345.3_ | 953-973 | 1693 | A-902030.1 | UUGGUAGU | NM_000345.3_ | 951-973 | 1782 |
| | | AAGUGACU | 953- | | | | CACUUAGG | 951- | | |
| | | ACCAA | 973_C21U_s | | | | UGUUUUU | 973_G1A_as | | |
| AD-689929.1 | A-1143470.1 | AACACCUA | NM_000345.3_ | 954-974 | 1694 | A-902032.1 | UGUGGUAG | NM_000345.3_ | 952-974 | 1783 |
| | | AGUGACUA | 954-974_s | | | | UCACUUAG | 952-974_as | | |
| | | CCACA | | | | | GUGUUUU | | | |
| AD-689930.1 | A-1143472.1 | ACACCUAA | NM_000345.3_ | 955-975 | 1695 | A-902034.1 | UAGUGGUA | NM_000345.3_ | 953-975 | 1784 |
| | | GUGACUAC | 955-975_s | | | | GUCACUUA | 953-975_as | | |
| | | CACUA | | | | | GGUGUUU | | | |
| AD-689931.1 | A-1143474.1 | CACCUAAG | NM_000345.3_ | 956-976 | 1696 | A-902036.1 | UAAGUGGU | NM_000345.3_ | 954-976 | 1785 |
| | | UGACUACC | 956- | | | | AGUCACUU | 954-976_as | | |
| | | ACUUA | 976_A21U_s | | | | AGGUGUU | | | |
| AD-689932.1 | A-1143476.1 | ACCUAAGU | NM_000345.3_ | 957-977 | 1697 | A-152515.1 | UUAAGUGG | NM_007308.2_ | 955-977 | 1786 |
| | | GACUACCA | 957-977_s | | | | UAGUCACU | 869-890_as | | |
| | | CUUAA | | | | | UAGGUGU | | | |
| AD-689933.1 | A-1143478.1 | CCUAAGUG | NM_000345.3_ | 958-978 | 1698 | A-902038.1 | UAUAAGUG | NM_000345.3_ | 956-978 | 1787 |
| | | ACUACCAC | 958-978_s | | | | GUAGUCAC | 956-978_as | | |
| | | UUAUA | | | | | UUAGGUG | | | |
| AD-689934.1 | A-1143480.1 | CUAAGUGA | NM_000345.3_ | 959-979 | 1699 | A-902040.1 | UAAUAAGU | NM_000345.3_ | 957-979 | 1788 |
| | | CUACCACU | 959-979_s | | | | GGUAGUCA | 957-979_as | | |
| | | UAUUA | | | | | CUUAGGU | | | |
| AD-689935.1 | A-1143482.1 | UAAGUGAC | NM_000345.3_ | 960-980 | 1700 | A-902042.1 | UAAAUAAG | NM_000345.3_ | 958-980 | 1789 |
| | | UACCACUU | 960- | | | | UGGUAGUC | 958-980_as | | |
| | | AUUUA | 980_C21U_s | | | | ACUUAGG | | | |
| AD-689936.1 | A-1143484.1 | AAGUGACU | NM_000345.3_ | 961-981 | 1701 | A-902044.1 | UGAAAUAA | NM_000345.3_ | 959-981 | 1790 |
| | | ACCACUUA | 961-981_s | | | | GUGGUAGU | 959-981_as | | |
| | | UUUCA | | | | | CACUUAG | | | |
| AD-689937.1 | A-1143486.1 | AGUGACUA | NM_000345.3_ | 962-982 | 1702 | A-902046.1 | UAGAAAUA | NM_000345.3_ | 960-982 | 1791 |
| | | CCACUUAU | 962- | | | | AGUGGUAG | 960-982_as | | |
| | | UUCUA | 982_A21U_s | | | | UCACUUA | | | |
| AD-689938.1 | A-1143488.1 | GUGACUAC | NM_000345.3_ | 963-983 | 1703 | A-152519.1 | UUAGAAAU | NM_007308.2_ | 961-983 | 1792 |
| | | CACUUAUU | 963- | | | | AAGUGGUA | 875-896_as | | |
| | | UCUAA | 983_A21U_s | | | | GUCACUU | | | |
| AD-689939.1 | A-1143490.1 | UGACUACC | NM_000345.3_ | 964-984 | 1704 | A-152535.1 | UUUAGAAA | NM_007308.2_ | 962-984 | 1793 |
| | | ACUUAUUU | 964- | | | | UAAGUGGU | 876-897_as | | |
| | | CUAAA | 984_A21U_s | | | | AGUCACU | | | |
| AD-690068.1 | A-1143726.1 | AAACUAUG | NM_000345.3_ | 1142-1162 | 1705 | A-902279.1 | UUAUUUAU | NM_000345.3_ | 1140-1162 | 1794 |
| | | CACCUAUA | 1142- | | | | AGGUGCAU | 1140- | | |
| | | AAUAA | 1162_C21U_s | | | | AGUUUCA | 1162_G1A_as | | |
| AD-690079.1 | A-1316237.1 | AUGUGUUU | XM_00555542 | 1358-1378 | 1706 | A-920846.1 | UCACAAGU | NM_001042451. | 1356-1378 | 1795 |
| | | UAUUAACU | 0.2_1358- | | | | UAAUAAAA | 2_1214- | | |
| | | UGUGA | 1378_s | | | | CACAUCA | 1236_as | | |
| AD-690080.1 | A-1316238.1 | UGUGUUUU | XM_00555542 | 1359-1379 | 1707 | A-920848.1 | UACACAAG | NM_001042451. | 1357-1379 | 1796 |
| | | AUUAACUU | 0.2_1359- | | | | UUAAUAAA | 2_1215- | | |
| | | GUGUA | 1379_s | | | | ACACAUC | 1237_as | | |
| AD-690092.1 | A-1143812.1 | UUGUGUUU | NM_000345.3_ | 1204-1224 | 1708 | A-902360.1 | UCCAUUUA | NM_000345.3_ | 1202-1224 | 1797 |
| | | GUAUAUAA | 1204-1224_s | | | | UAUACAAA | 1202-1224_as | | |
| | | AUGGA | | | | | CACAAGU | | | |
| AD-691823.1 | A-1143102.1 | UGUACAAG | NM_000345.3_ | 738-758 | 1709 | A-1318408.1 | UUGGAACU | XM_005555420. | 736-758 | 1798 |
| | | UGCUCAGU | 738- | | | | GAGCACUU | 2_905- | | |
| | | UCCAA | 758_A21U_s | | | | GUACAAG | 927_as | | |
| AD-691824.1 | A-1143104.1 | GUACAAGU | NM_000345.3_ | 739-759 | 1710 | A-1318409.1 | UUUGGAAC | XM_005555420. | 737-759 | 1799 |
| | | GCUCAGUU | 739-759_s | | | | UGAGCACU | 2_906- | | |
| | | CCAAA | | | | | UGUACAA | 928_as | | |
| AD-691843.1 | A-1316093.1 | UGAAGUCU | XM_005555420. | 971-991 | 1711 | A-1318428.1 | UACUGCTG | XM_005555420. | 969-991 | 1800 |
| | | UCCAUCAG | 2_971- | | | | AUGGAAGA | 2_969- | | |
| | | CAGUA | 991_G21A_s | | | | CUUCAAA | 991_C1U_as | | |
| AD-691844.1 | A-1143232.1 | GAAGUCUU | NM_000345.3_ | 803-823 | 1712 | A-1318429.1 | UCACUGCU | XM_005555420. | 801-823 | 1801 |
| | | CCAUCAGC | 803- | | | | GAUGGAAG | 2_970- | | |
| | | AGUGA | 823_A21U_s | | | | ACUUCAA | 992_as | | |
| AD-691845.1 | A-1143234.1 | AAGUCUUC | NM_000345.3_ | 804-824 | 1713 | A-1318430.1 | UUCACUGC | XM_005555420. | 802-824 | 1802 |
| | | CAUCAGCA | 804-824_s | | | | UGAUGGAA | 2_971- | | |
| | | GUGAA | | | | | GACUUCA | 993_as | | |
| AD-691875.1 | A-1143462.1 | UAAAAACA | NM_000345.3_ | 950-970 | 1714 | A-1318460.1 | UUAGUCAC | XM_005555420. | 948-970 | 1803 |
| | | CCUAAGUG | 950- | | | | UUAGGUGU | 2_1117- | | |
| | | ACUAA | 970_C21U_s | | | | UUUUAAA | 1139_G1U_as | | |
| AD-691953.1 | A-1316237.1 | AUGUGUUU | XM_005555420. | 1358-1378 | 1715 | A-1318538.1 | UCACAAGU | XM_005555420. | 1356-1378 | 1804 |
| | | UAUUAACU | 2_1358- | | | | UAAUAAAA | 2_1356- | | |
| | | UGUGA | 1378_s | | | | CACAUCA | 1378_as | | |
| AD-691954.1 | A-1316238.1 | UGUGUUUU | XM_005555420. | 1359-1379 | 1716 | A-1318539.1 | UACACAAG | XM_005555420. | 1357-1379 | 1805 |
| | | AUUAACUU | 2_1359- | | | | UUAAUAAA | 2_1357- | | |
| | | GUGUA | 1379_s | | | | ACACAUC | 1379_as | | |

TABLE 4
SNCA In Vitro Screen Performed by RNA-seq in BE(2)-C Cells.

| Duplex ID (10 nM dose) | On target knock down (%) |
|---|---|
| AD-595724 | −13.05% |
| AD-595769 | −75.51% |
| AD-595854 | −82.58% |
| AD-595855 | −57.20% |
| AD-595866 | −55.77% |
| AD-595926 | −84.84% |
| AD-596096 | −14.89% |
| AD-596100 | −7.98% |
| AD-596124 | −84.38% |
| AD-596126 | −18.96% |
| AD-596127 | −59.08% |
| AD-596128 | −64.34% |
| AD-596129 | −55.98% |
| AD-596130 | −85.95% |
| AD-596131 | −43.71% |
| AD-596133 | −82.68% |
| AD-596137 | −86.68% |
| AD-596144 | −72.65% |
| AD-596147 | −43.35% |
| AD-596168 | −80.88% |
| AD-596169 | −68.13% |
| AD-596170 | −81.96% |
| AD-596171 | −75.26% |
| AD-596172 | −89.10% |
| AD-596175 | −82.02% |
| AD-596177 | −87.61% |
| AD-596215 | −78.99% |
| AD-596231 | −85.14% |
| AD-596235 | −61.45% |
| AD-596283 | −66.76% |
| AD-596319 | −80.92% |
| AD-596320 | −67.82% |
| AD-596322 | −60.23% |
| AD-596323 | −87.91% |
| AD-596325 | −25.11% |
| AD-596326 | −28.25% |
| AD-596362 | −66.57% |
| AD-596390 | −48.41% |
| AD-596391 | −67.87% |
| AD-596392 | −75.16% |
| AD-596396 | −72.01% |
| AD-596402 | −73.89% |
| AD-596425 | −76.17% |
| AD-596426 | −70.03% |
| AD-596427 | −59.75% |
| AD-596431 | −65.79% |
| AD-596436 | −80.94% |
| AD-596469 | −47.84% |
| AD-596477 | −39.38% |
| AD-596515 | −65.28% |
| AD-596517 | −71.68% |
| AD-596605 | −38.29% |
| AD-596606 | −44.42% |
| AD-596609 | −36.07% |
| AD-596709 | 2.38% |
| AD-597019 | −11.57% |
| AD-597232 | −10.43% |
| AD-597297 | −28.11% |
| AD-597298 | −20.19% |
| AD-597325 | −17.38% |
| AD-597326 | −29.27% |
| AD-597327 | −15.39% |
| AD-597335 | −32.70% |
| AD-597397 | −26.07% |
| AD-597398 | −36.26% |
| AD-597404 | −30.07% |
| AD-597409 | 16.73% |
| AD-597410 | −7.55% |
| AD-597417 | −4.79% |
| AD-597443 | −22.35% |
| AD-597455 | −1.69% |
| AD-597459 | −34.53% |
| AD-597460 | −24.46% |
| AD-597534 | −17.19% |
| AD-597569 | −20.02% |
| AD-597861 | −8.34% |
| AD-597864 | −16.26% |
| AD-597894 | −42.84% |
| AD-597898 | −25.02% |
| AD-597899 | 9.74% |
| AD-597900 | 0.69% |
| AD-597925 | −12.17% |
| AD-597927 | −10.96% |
| AD-597937 | −19.23% |
| AD-597946 | −11.95% |
| AD-597972 | −26.16% |
| AD-597974 | −25.23% |
| AD-597984 | −30.85% |
| AD-597988 | −10.49% |
| AD-597989 | −17.11% |

TABLE 5
SNCA Knock-Down Assessed by qPCR
and RNA-seq in BE(2)-C cells.

| | % of Message Remaining | | | | |
|---|---|---|---|---|---|
| | Passage | Passage | Passage | | |
| DuplexID | 1 | 2 | 3 | Average | STD |
| AD-596477.1 | 47 | 69 | 58 | 58 | 11.01992 |
| AD-596235.1 | 33 | 50 | 36 | 40 | 9.269913 |
| AD-597232.1 | 61 | 99 | 75 | 78 | 19.29934 |
| AD-597298.1 | 67 | 80 | 63 | 70 | 8.825857 |
| AD-596171.1 | 28 | 35 | 19 | 27 | 8.130847 |
| AD-597925.1 | 61 | 83 | 73 | 72 | 10.78871 |
| AD-597927.1 | 74 | 78 | 79 | 77 | 2.519625 |
| AD-596319.1 | 20 | 25 | 20 | 22 | 3.215917 |
| AD-596396.1 | 29 | 41 | 29 | 33 | 6.936593 |
| AD-596402.1 | 26 | 39 | 27 | 31 | 7.3094 |
| AD-597459.1 | 63 | 84 | 75 | 74 | 10.58517 |
| AD-596131.1 | 39 | 54 | 45 | 46 | 7.784137 |
| AD-596320.1 | 34 | 48 | 33 | 38 | 8.408126 |
| AD-596517.1 | 26 | 40 | 27 | 31 | 7.905545 |
| AD-596606.1 | 52 | 80 | 65 | 66 | 14.14451 |
| AD-596609.1 | 59 | 84 | 59 | 67 | 14.7158 |
| AD-597297.1 | 69 | 90 | 72 | 77 | 11.20186 |
| AD-597417.1 | 62 | 85 | 68 | 72 | 11.85658 |
| AD-596100.1 | 66 | 81 | 71 | 73 | 7.790383 |
| AD-596172.1 | 20 | 31 | 17 | 23 | 7.374681 |
| AD-596425.1 | 25 | 36 | 24 | 29 | 6.681592 |
| AD-596427.1 | 30 | 45 | 29 | 34 | 8.806158 |
| AD-596515.1 | 22 | 38 | 26 | 29 | 8.173514 |
| AD-596605.1 | 51 | 69 | 54 | 58 | 9.276456 |
| AD-597325.1 | 72 | 90 | 68 | 77 | 11.41825 |
| AD-597326.1 | 67 | 92 | 68 | 76 | 13.75651 |
| AD-597335.1 | 64 | 94 | 70 | 76 | 16.07252 |
| AD-597460.1 | 64 | 101 | 79 | 81 | 18.54527 |
| AD-597984.1 | 63 | 92 | 71 | 75 | 14.71759 |
| AD-595854.1 | 23 | 33 | 19 | 25 | 7.324429 |
| AD-595855.1 | 35 | 46 | 35 | 39 | 6.328028 |
| AD-596126.1 | 126 | 83 | 1946 | 718 | 1063.644 |
| AD-596127.1 | 44 | 64 | 41 | 50 | 12.77985 |
| AD-596133.1 | 25 | 35 | 18 | 26 | 8.279378 |
| AD-596144.1 | 24 | 36 | 26 | 29 | 6.505101 |
| AD-596147.1 | 39 | 72 | 51 | 54 | 16.82907 |
| AD-596175.1 | 21 | 31 | 25 | 26 | 4.630111 |
| AD-596177.1 | 19 | 30 | 18 | 22 | 6.563827 |
| AD-596283.1 | 29 | 48 | 45 | 41 | 10.09666 |
| AD-596323.1 | 20 | 32 | 18 | 23 | 7.852572 |
| AD-596392.1 | 25 | 37 | 22 | 28 | 7.888691 |
| AD-596426.1 | 30 | 42 | 30 | 34 | 7.000756 |
| AD-596469.1 | 46 | 65 | 53 | 55 | 9.591057 |
| AD-596709.1 | 106 | 122 | 98 | 109 | 12.03926 |
| AD-595769.1 | 22 | 38 | 23 | 27 | 8.923867 |
| AD-597861.1 | 71 | 94 | 84 | 83 | 11.82668 |
| AD-597937.1 | 70 | 98 | 78 | 82 | 14.10247 |
| AD-64543.7* | 66 | 94 | 84 | 81 | 13.81149 |
| AD-597988.1 | 74 | 93 | 81 | 82 | 9.744747 |
| AD-597989.1 | 62 | 83 | 79 | 75 | 11.5116 |
| AD-596129.1 | 32 | 49 | 44 | 42 | 8.432036 |
| AD-596170.1 | 21 | 31 | 19 | 24 | 6.210674 |
| AD-596322.1 | 41 | 68 | 38 | 49 | 16.32933 |
| AD-596390.1 | 32 | 52 | 46 | 43 | 10.17705 |
| AD-596391.1 | 26 | 38 | 27 | 31 | 6.732695 |
| AD-596436.1 | 24 | 36 | 27 | 29 | 6.453891 |
| AD-597019.1 | 63 | 84 | 78 | 75 | 10.74946 |
| AD-595724.1 | 63 | 79 | 85 | 76 | 11.66526 |
| AD-597404.1 | 63 | 80 | 83 | 75 | 10.98295 |
| AD-597409.1 | 67 | 94 | 102 | 88 | 18.29244 |
| AD-597410.1 | 66 | 99 | 80 | 82 | 16.35816 |
| AD-597864.1 | 66 | 98 | 76 | 80 | 16.31143 |
| AD-597946.1 | 61 | 90 | 72 | 74 | 15.02109 |
| AD-597972.1 | 83 | 87 | 74 | 81 | 6.890878 |
| AD-597974.1 | 70 | 95 | 78 | 81 | 12.69742 |
| AD-595866.1 | 26 | 42 | 35 | 34 | 7.742897 |
| AD-596128.1 | 28 | 35 | 84 | 49 | 30.52729 |
| AD-596137.1 | 17 | 26 | 18 | 20 | 4.83207 |
| AD-596215.1 | 18 | 32 | 20 | 23 | 7.6555 |
| AD-596326.1 | 45 | 69 | 64 | 59 | 12.6858 |
| AD-597327.1 | 62 | 83 | 81 | 75 | 11.18543 |
| AD-597569.1 | 58 | 87 | 88 | 77 | 17.01053 |
| AD-597894.1 | 64 | 86 | 77 | 76 | 11.04145 |
| AD-597899.1 | 74 | 97 | 121 | 97 | 23.53896 |
| AD-597900.1 | 73 | 95 | 101 | 90 | 14.8509 |
| AD-595926.1 | 24 | 30 | 21 | 25 | 4.467998 |
| AD-596168.1 | 21 | 31 | 19 | 24 | 6.441417 |
| AD-596169.1 | 29 | 39 | 29 | 32 | 6.03107 |
| AD-596231.1 | 19 | 31 | 19 | 23 | 6.895029 |
| AD-596362.1 | 30 | 42 | 33 | 35 | 6.325971 |
| AD-58643.17 | 42 | 54 | 45 | 47 | 6.360314 |
| AD-597398.1 | 75 | 94 | 85 | 85 | 9.515257 |
| AD-597443.1 | 68 | 82 | 76 | 75 | 6.898931 |
| AD-597534.1 | 69 | 94 | 83 | 82 | 12.47207 |
| mock | 74 | 103 | 90 | 89 | 14.74418 |
| AD-596096.1 | 63 | 86 | 73 | 74 | 11.67158 |
| AD-596124.1 | 26 | 35 | 27 | 29 | 5.345602 |
| AD-596130.1 | 22 | 30 | 21 | 24 | 5.05537 |
| AD-596325.1 | 48 | 69 | 64 | 60 | 11.16311 |
| AD-596431.1 | 27 | 40 | 34 | 34 | 6.512177 |
| mock | 78 | 99 | 113 | 97 | 17.23253 |
| AD-597397.1 | 62 | 87 | 75 | 75 | 12.38764 |
| AD-597455.1 | 63 | 94 | 92 | 83 | 17.36572 |
| AD-597898.1 | 131 | 89 | 84 | 101 | 26.05352 |
| mock | 74 | 98 | 95 | 89 | 12.99399 |
| mock | 233 | 100 | 104 | 146 | 75.6163 |

*No KD for TMP, since TMP does not express in Be(2)C

TABLE 6
Knockdown of SNCA in HeLa and B16F10 Cells Assessed
Via Branched DNA Method, Relative to GAPDH.

| | | HeLa | | | | B16F10 | | | |
|---|---|---|---|---|---|---|---|---|---|
| Duplex ID | shOP | 10 nM | StDev | 0.1 nM | StDev | 10 nM | StDev | 0.1 nM | StDev |
| AD-690092.1 | 12.5 | 48.1 | 7.8 | 83.4 | 4.8 | 15.8 | 1.9 | 78.0 | 2.3 |
| AD-596564.1 | 12.5 | 71.0 | 7.1 | 97.1 | 6.4 | 22.7 | 10.4 | 85.7 | 4.7 |
| AD-689461.1 | 15.4 | 15.9 | 5.6 | 97.8 | 13.0 | 18.5 | 2.4 | 109.2 | 4.1 |
| AD-595935.1 | 15.4 | 40.1 | 3.6 | 109.4 | 5.0 | 42.8 | 1.2 | 90.6 | 22.4 |
| AD-596401.1 | 19.5 | 20.5 | 1.1 | 44.4 | 14.2 | 15.0 | 3.2 | 69.5 | 4.6 |
| AD-689937.1 | 19.5 | 23.6 | 1.4 | 45.2 | 6.8 | 15.4 | 2.7 | 40.9 | 4.5 |
| AD-689936.1 | 23 | 23.4 | 2.7 | 27.1 | 3.3 | 19.6 | 4.5 | 48.6 | 8.1 |
| AD-689463.1 | 23.9 | 10.6 | 0.1 | 92.4 | 8.8 | 14.6 | 1.1 | 106.9 | 8.8 |
| AD-595937.1 | 23.9 | 15.0 | 1.5 | 103.6 | 10.3 | 18.6 | 4.0 | 105.3 | 11.7 |
| AD-690080.1 | 27.1 | 57.8 | 9.6 | 90.2 | 5.6 | 16.4 | 1.7 | 78.1 | 9.7 |
| AD-691954.1 | 27.1 | 71.4 | 12.1 | 108.2 | 7.0 | 15.9 | 1.4 | 89.2 | 10.6 |
| AD-689464.1 | 28 | 13.6 | 2.1 | 92.8 | 23.9 | 18.5 | 2.0 | 145.3 | 29.1 |
| AD-595938.1 | 28 | 48.1 | 3.0 | 105.8 | 9.4 | 58.6 | 3.3 | 122.5 | 25.3 |
| AD-689753.1 | 30.4 | 10.4 | 0.4 | 76.5 | 3.0 | 16.3 | 1.6 | 90.0 | 11.7 |
| AD-596215.2 | 30.4 | 13.8 | 0.9 | 98.2 | 7.9 | 17.1 | 5.2 | 91.0 | 17.4 |
| AD-689935.1 | 32.5 | 21.8 | 2.9 | 76.1 | 6.2 | 13.6 | 1.5 | 75.7 | 5.4 |
| AD-690079.1 | 33.7 | 43.0 | 10.3 | 82.0 | 1.4 | 15.0 | 2.5 | 59.1 | 1.8 |
| AD-691953.1 | 33.7 | 89.4 | 2.2 | 104.9 | 7.1 | 19.1 | 3.9 | 82.9 | 2.8 |
| AD-689938.1 | 38.5 | 19.9 | 0.9 | 41.6 | 5.3 | 17.8 | 3.2 | 37.5 | 5.4 |
| AD-596402.2 | 38.5 | 23.6 | 0.8 | 84.2 | 7.2 | 21.3 | 1.4 | 90.7 | 5.6 |
| AD-595768.1 | 38.6 | 50.3 | 4.3 | 61.1 | 22.2 | 63.9 | 13.7 | 101.3 | 2.8 |
| AD-689314.1 | 38.6 | 18.5 | 2.5 | 82.8 | 8.1 | 22.7 | 3.3 | 101.2 | 3.7 |
| AD-689459.1 | 40.7 | 8.3 | 1.0 | 59.9 | 4.7 | 11.8 | 2.8 | 84.2 | 4.3 |
| AD-595933.1 | 40.7 | 25.0 | 3.0 | 98.6 | 2.8 | 24.6 | 2.1 | 87.9 | 8.5 |
| AD-689462.1 | 46.7 | 11.4 | 1.4 | 82.1 | 13.6 | 14.7 | 0.8 | 113.5 | 5.9 |
| AD-595936.1 | 46.7 | 71.0 | 9.6 | 103.9 | 11.7 | 67.7 | 6.2 | 107.1 | 12.0 |
| AD-689934.1 | 51.3 | 24.3 | 1.1 | 59.5 | 3.3 | 16.7 | 2.1 | 86.7 | 8.1 |
| AD-596398.1 | 51.3 | 76.3 | 3.2 | 105.2 | 12.5 | 49.0 | 8.4 | 93.5 | 4.0 |
| AD-690068.1 | 57.9 | 25.5 | 2.0 | 72.0 | 7.2 | 14.2 | 3.3 | 67.6 | 4.3 |
| AD-596521.1 | 57.9 | 44.7 | 2.3 | 106.0 | 9.9 | 40.9 | 5.4 | 89.1 | 5.1 |
| AD-595769.2 | 63.8 | 10.3 | 1.5 | 72.5 | 5.9 | 21.6 | 2.2 | 96.3 | 12.9 |
| AD-689315.1 | 63.8 | 12.8 | 0.9 | 73.5 | 5.1 | 20.3 | 4.3 | 115.4 | 6.3 |
| AD-689615.1 | 65.7 | 11.5 | 1.4 | 85.5 | 2.0 | 19.0 | 3.4 | 98.9 | 3.5 |
| AD-596098.1 | 65.7 | 59.2 | 2.4 | 99.5 | 3.6 | 81.7 | 12.6 | 88.5 | 4.0 |
| AD-689939.1 | 65.8 | 24.9 | 6.9 | 53.2 | 7.7 | 17.0 | 2.1 | 46.0 | 4.4 |
| AD-596403.1 | 65.8 | 26.3 | 3.3 | 80.0 | 3.9 | 23.7 | 3.3 | 79.7 | 3.7 |
| AD-596328.1 | 67.6 | 49.7 | 5.4 | 103.5 | 5.3 | 107.9 | 9.2 | 92.0 | 7.4 |
| AD-689316.1 | 69.2 | 22.2 | 4.8 | 96.2 | 1.4 | 39.0 | 10.9 | 90.0 | 18.3 |
| AD-595770.1 | 69.2 | 15.8 | 4.3 | 96.8 | 18.4 | 23.5 | 7.1 | 95.2 | 2.0 |
| AD-689748.1 | 71.5 | 7.0 | 0.5 | 48.9 | 5.5 | 10.0 | 1.9 | 37.5 | 5.2 |
| AD-691824.1 | 71.5 | 11.4 | 1.1 | 81.7 | 2.0 | 18.7 | 3.4 | 77.3 | 5.8 |
| AD-689933.1 | 73.2 | 27.4 | 4.7 | 86.7 | 11.8 | 37.2 | 4.0 | 87.3 | 3.7 |
| AD-596397.1 | 73.2 | 19.8 | 3.8 | 90.3 | 8.4 | 18.6 | 3.5 | 95.4 | 7.3 |
| AD-689747.1 | 75.6 | 14.9 | 4.2 | 48.8 | 1.7 | 13.8 | 0.3 | 42.5 | 8.2 |
| AD-691823.1 | 75.6 | 31.8 | 6.8 | 84.4 | 21.0 | 29.0 | 1.5 | 103.9 | 3.4 |
| AD-689788.1 | 75.7 | 29.8 | 2.3 | 91.4 | 2.9 | 20.6 | 1.0 | 95.0 | 20.7 |
| AD-596276.1 | 75.7 | 66.1 | 2.4 | 105.0 | 12.9 | 42.6 | 7.9 | 104.9 | 8.8 |
| AD-596100.2 | 76.6 | 93.7 | 6.8 | 83.8 | 10.8 | 91.5 | 3.5 | 114.4 | 8.6 |
| AD-689617.1 | 76.6 | 83.1 | 4.1 | 95.4 | 4.6 | 99.2 | 4.8 | 118.5 | 8.5 |
| AD-689452.1 | 81.4 | 11.7 | 6.1 | 76.2 | 13.7 | 15.6 | 2.4 | 97.8 | 10.5 |
| AD-689616.1 | 81.4 | 45.0 | 6.9 | 94.4 | 2.9 | 77.2 | 3.7 | 107.6 | 7.9 |
| AD-595926.2 | 81.4 | 15.6 | 2.4 | 98.5 | 6.1 | 23.1 | 4.7 | 89.5 | 4.8 |
| AD-596099.1 | 81.4 | 48.6 | 3.3 | 105.0 | 8.2 | 78.4 | 5.2 | 104.3 | 8.0 |
| AD-689929.1 | 84.2 | 34.5 | 2.4 | 63.8 | 7.8 | 17.7 | 1.0 | 70.6 | 2.6 |
| AD-596393.1 | 84.2 | 30.9 | 5.2 | 68.8 | 34.8 | 30.9 | 4.3 | 91.9 | 4.1 |
| AD-691845.1 | 85.1 | 86.0 | 24.9 | 92.0 | 5.2 | 49.4 | 7.9 | 85.1 | 2.9 |
| AD-689787.1 | 85.1 | 35.4 | 5.1 | 97.6 | 18.3 | 25.2 | 3.7 | 93.1 | 11.2 |
| AD-689926.1 | 88.2 | 25.5 | 1.9 | 71.6 | 3.3 | 22.8 | 1.0 | 65.8 | 15.9 |
| AD-596390.2 | 88.2 | 50.8 | 19.0 | 93.7 | 3.2 | 35.4 | 6.7 | 83.6 | 4.1 |
| AD-595771.1 | 89.3 | 102.8 | 8.2 | 99.0 | 10.6 | 80.3 | 5.8 | 86.8 | 5.2 |
| AD-689317.1 | 89.3 | 61.6 | 8.5 | 107.8 | 7.6 | 71.2 | 13.5 | 99.0 | 3.2 |
| AD-689835.1 | 89.9 | 17.7 | 3.5 | 93.9 | 8.8 | 77.2 | 3.8 | 102.6 | 17.7 |
| AD-596326.2 | 89.9 | 61.3 | 4.9 | 109.9 | 4.9 | 102.8 | 4.8 | 94.6 | 2.9 |
| AD-691843.1 | 90.1 | 15.0 | 1.6 | 73.2 | 12.0 | 19.1 | 5.2 | 91.8 | 10.1 |
| AD-689907.1 | 90.1 | 12.0 | 2.4 | 87.2 | 19.6 | 12.2 | 2.5 | 104.3 | 15.9 |
| AD-689755.1 | 90.2 | 13.6 | 1.3 | 86.2 | 2.0 | 16.6 | 2.6 | 88.3 | 10.0 |
| AD-596217.1 | 90.2 | 15.1 | 1.9 | 89.0 | 5.8 | 16.8 | 2.1 | 74.7 | 3.5 |
| AD-689928.1 | 90.6 | 29.1 | 3.4 | 61.1 | 3.5 | 18.3 | 2.4 | 69.4 | 9.5 |
| AD-596392.2 | 90.6 | 31.2 | 1.6 | 71.1 | 3.4 | 19.1 | 0.9 | 69.6 | 10.2 |
| AD-596394.1 | 92.8 | 29.5 | 4.4 | 74.5 | 11.1 | 28.9 | 4.7 | 100.6 | 6.2 |
| AD-689930.1 | 92.8 | 21.5 | 2.1 | 87.4 | 7.1 | 23.1 | 2.3 | 79.3 | 3.9 |
| AD-689925.1 | 93 | 36.0 | 5.3 | 51.5 | 10.1 | 18.4 | 1.9 | 64.1 | 2.4 |
| AD-691875.1 | 93 | 26.1 | 2.6 | 66.8 | 10.5 | 25.1 | 2.7 | 83.8 | 11.7 |
| AD-691844.1 | 93.8 | 14.6 | 3.0 | 88.7 | 2.0 | 15.7 | 1.5 | 84.1 | 16.9 |
| AD-689786.1 | 93.8 | 12.2 | 1.9 | 91.5 | 21.8 | 11.2 | 6.3 | 79.5 | 5.8 |
| AD-689320.1 | 95.4 | 22.2 | 1.9 | 86.2 | 6.3 | 60.4 | 8.6 | 105.4 | 4.3 |
| AD-595774.1 | 95.4 | 18.6 | 2.3 | 88.9 | 4.2 | 37.9 | 10.4 | 94.6 | 6.9 |
| AD-689927.1 | 96.1 | 31.6 | 2.6 | 76.1 | 13.3 | 17.7 | 0.7 | 69.0 | 2.8 |
| AD-596391.2 | 96.1 | 22.9 | 1.2 | 95.4 | 8.2 | 27.4 | 2.3 | 89.4 | 4.9 |
| AD-689318.1 | 96.5 | 21.8 | 2.2 | 93.4 | 1.9 | 33.5 | 10.2 | 99.3 | 4.4 |
| AD-596396.2 | 96.5 | 19.3 | 6.9 | 93.9 | 5.9 | 26.2 | 6.9 | 101.7 | 10.0 |
| AD-689932.1 | 96.5 | 26.4 | 2.1 | 98.6 | 6.1 | 37.9 | 6.1 | 87.6 | 2.8 |
| AD-595772.1 | 96.5 | 90.0 | 24.0 | 106.3 | 20.6 | 89.1 | 4.3 | 96.4 | 17.1 |
| AD-689618.1 | 96.8 | 54.1 | 9.2 | 95.6 | 3.3 | 55.4 | 5.1 | 105.9 | 5.7 |
| AD-596101.1 | 96.8 | 82.6 | 10.2 | 109.6 | 8.7 | 81.6 | 5.3 | 96.8 | 4.8 |
| AD-596395.1 | 97.2 | 22.1 | 1.4 | 81.1 | 3.9 | 17.6 | 3.4 | 87.0 | 2.1 |
| AD-689931.1 | 97.2 | 22.3 | 2.2 | 83.8 | 9.5 | 22.6 | 3.0 | 72.8 | 7.8 |
| AD-689319.1 | 98.1 | 16.6 | 2.1 | 91.8 | 4.5 | 43.0 | 5.3 | 104.2 | 2.6 |
| AD-595773.1 | 98.1 | 9.0 | 0.3 | 93.9 | 2.3 | 22.6 | 3.3 | 85.1 | 4.4 |

TABLE 7
Knockdown of SNCA in Human BE(2)-C Cells Assessed Via qPCR, and Observed Inhibition
of SNCA Expressed Via Dual-Luciferase psiCHECK2 Vector in Cos-7 Cells.

| | human BE(2)C qPCR | | | | human Dual-Luc | | | | mouse Dual-Luc | | | |
|---|---|---|---|---|---|---|---|---|---|---|---|---|
| | 10 nM % | | 0.1 nM % | | 10 nM % | | 0.1 nM % | | 10 nM % | | 0.1 nM % | |
| | Message | | Message | | Message | | Message | | Message | | Message | |
| Duplex ID | Remaining | STD | Remaining | STD | Remaining | STD | Remaining | STD | Remaining | STD | Remaining | STD |
| AD-476320 | 17.8 | 5.5 | 48.7 | 16.3 | 15.3 | 4.0 | 103.8 | 3.2 | 43.1 | 7.3 | 100.6 | 8.4 |
| AD-464778 | 18.9 | 3.0 | 46.1 | 16.8 | 18.2 | 3.1 | 102.4 | 10.0 | 100.3 | 7.9 | 94.4 | 5.9 |
| AD-464314 | 19.2 | 1.6 | 30.7 | 6.0 | 8.9 | 2.1 | 56.5 | 6.1 | 74.9 | 5.7 | 80.9 | 2.8 |
| AD-464782 | 19.3 | 6.0 | 57.0 | 7.5 | 18.1 | 3.8 | 83.7 | 5.6 | 101.1 | 17.8 | 97.6 | 10.9 |
| AD-476089 | 19.4 | 1.6 | 51.3 | 8.7 | 62.0 | 3.5 | 98.0 | 3.2 | 60.3 | 15.3 | 106.5 | 12.6 |
| AD-464694 | 20.0 | 2.4 | 23.8 | 5.3 | 19.6 | 2.9 | 101.6 | 9.0 | 87.8 | 12.2 | 90.0 | 7.7 |
| AD-475661 | 20.8 | 6.2 | 62.3 | 3.5 | 16.4 | 3.5 | 79.3 | 8.4 | 34.4 | 6.7 | 89.4 | 10.2 |
| AD-464630 | 22.0 | 2.6 | 33.4 | 5.6 | 50.2 | 6.6 | 85.7 | 8.3 | 99.5 | 19.0 | 90.5 | 9.2 |
| AD-476317 | 23.0 | 0.5 | 44.9 | 7.2 | 21.4 | 3.0 | 80.9 | 7.2 | 45.2 | 6.2 | 107.0 | 8.4 |
| AD-464313 | 23.4 | 4.5 | 63.1 | 14.1 | 23.5 | 3.6 | 83.6 | 8.8 | 74.4 | 7.1 | 93.2 | 6.4 |
| AD-464634 | 23.5 | 6.9 | 29.8 | 11.8 | 17.4 | 1.4 | 76.0 | 5.1 | 79.0 | 16.2 | 96.8 | 10.8 |
| AD-476041 | 23.7 | 4.8 | 85.3 | 5.7 | 43.5 | 7.8 | 108.8 | 11.7 | 39.6 | 6.4 | 103.4 | 13.9 |
| AD-475930 | 23.8 | 6.9 | 86.2 | 11.8 | 98.6 | 8.1 | 89.5 | 5.5 | 96.6 | 4.2 | 100.5 | 7.2 |
| AD-464779 | 24.2 | 5.1 | 47.0 | 10.5 | 18.2 | 0.3 | 82.5 | 9.5 | 104.0 | 10.5 | 103.1 | 18.9 |
| AD-475927 | 24.7 | 4.8 | 105.9 | 14.4 | 119.1 | 9.5 | 92.1 | 8.8 | 89.3 | 11.2 | 97.5 | 14.7 |
| AD-464590 | 24.7 | 4.4 | 53.4 | 12.4 | 38.5 | 4.9 | 88.3 | 10.9 | 104.3 | 11.8 | 106.0 | 6.7 |
| AD-464585 | 25.2 | 5.5 | 63.6 | 10.8 | 76.6 | 12.4 | 89.0 | 7.1 | 98.4 | 7.1 | 87.9 | 10.2 |
| AD-464636 | 25.8 | 9.1 | 37.8 | 8.6 | 15.6 | 2.8 | 77.6 | 5.3 | 93.4 | 9.6 | 93.2 | 7.4 |
| AD-464977 | 25.8 | 8.1 | 34.3 | 7.1 | 21.4 | 4.7 | 79.2 | 4.1 | 26.3 | 8.5 | 78.8 | 11.2 |
| AD-476313 | 26.5 | 4.7 | 62.9 | 6.2 | 18.8 | 4.3 | 89.2 | 5.7 | 39.9 | 10.3 | 102.2 | 19.9 |
| AD-475728 | 26.5 | 9.9 | 94.0 | 13.4 | 11.4 | 2.1 | 86.4 | 5.8 | 29.1 | 4.7 | 88.9 | 12.5 |
| AD-464603 | 26.5 | 11.0 | 50.2 | 5.8 | 19.4 | 1.1 | 78.4 | 4.2 | 51.4 | 5.6 | 95.1 | 9.6 |
| AD-476306 | 26.8 | 8.0 | 69.3 | 13.9 | 27.1 | 3.0 | 93.7 | 8.0 | 20.5 | 3.0 | 90.3 | 14.0 |
| AD-464886 | 27.0 | 8.0 | 32.6 | 5.8 | 11.1 | 1.7 | 77.0 | 7.8 | 96.3 | 9.5 | 105.1 | 15.4 |
| AD-476316 | 27.5 | 1.8 | 54.9 | 15.9 | 18.9 | 3.3 | 83.0 | 6.2 | 41.0 | 9.0 | 94.1 | 2.4 |
| AD-464606 | 27.7 | 4.9 | 78.1 | 7.6 | 26.3 | 9.2 | 80.4 | 8.6 | 84.9 | 8.4 | 100.9 | 8.9 |
| AD-475723 | 28.2 | 6.0 | 85.4 | 13.9 | 20.9 | 2.4 | 88.7 | 1.2 | 68.8 | 6.0 | 94.8 | 5.0 |
| AD-464229 | 28.4 | 9.9 | 65.7 | 3.2 | 14.9 | 3.9 | 75.3 | 14.6 | 32.7 | 3.7 | 85.9 | 5.9 |
| AD-464742 | 28.4 | 9.2 | 43.2 | 8.2 | 11.7 | 2.6 | 77.5 | 11.3 | 75.1 | 12.1 | 94.4 | 11.4 |
| AD-476311 | 29.8 | 2.7 | 89.9 | 14.3 | 54.1 | 2.0 | 96.0 | 6.5 | 52.4 | 8.6 | 99.1 | 3.2 |
| AD-476312 | 31.1 | 7.5 | 77.2 | 13.4 | 35.6 | 5.3 | 86.0 | 17.1 | 55.6 | 1.7 | 110.0 | 16.9 |
| AD-464978 | 31.1 | 10.2 | 39.6 | 8.3 | 23.8 | 5.4 | 92.9 | 7.0 | 46.6 | 9.9 | 89.0 | 12.4 |
| AD-464814 | 32.3 | 9.6 | 27.3 | 3.0 | 13.2 | 5.4 | 69.7 | 1.4 | 22.9 | 0.6 | 68.7 | 4.6 |
| AD-476198 | 32.8 | 5.2 | 63.0 | 15.0 | 36.7 | 4.0 | 96.9 | 13.3 | 41.1 | 3.8 | 93.1 | 11.1 |
| AD-476321 | 33.0 | 7.2 | 43.7 | 7.0 | 15.0 | 1.6 | 81.6 | 3.6 | 21.8 | 3.1 | 78.6 | 8.4 |
| AD-464815 | 33.4 | 7.1 | 48.0 | 6.9 | 15.2 | 1.8 | 70.6 | 13.0 | 25.0 | 2.6 | 69.4 | 5.6 |
| AD-464936 | 33.7 | 5.3 | 32.0 | 4.5 | 30.8 | 7.4 | 91.1 | 12.8 | 93.2 | 9.2 | 90.5 | 15.1 |
| AD-476152 | 35.2 | 8.2 | 77.4 | 13.7 | 72.0 | 8.1 | 99.3 | 8.1 | 77.3 | 7.2 | 91.6 | 11.7 |
| AD-475929 | 35.7 | 5.5 | 89.1 | 22.7 | 145.1 | 12.3 | 104.6 | 16.1 | 103.9 | 16.3 | 91.3 | 15.9 |
| AD-475895 | 35.7 | 2.6 | 93.2 | 3.9 | 123.5 | 3.7 | 98.3 | 4.2 | 108.9 | 11.3 | 101.7 | 11.1 |
| AD-464884 | 35.8 | 10.6 | 32.3 | 4.0 | 11.8 | 0.9 | 78.9 | 11.1 | 71.3 | 10.4 | 91.0 | 2.6 |
| AD-464928 | 36.7 | 9.9 | 47.1 | 5.6 | 11.2 | 1.2 | 55.7 | 5.5 | 87.2 | 12.7 | 98.6 | 10.8 |
| AD-464885 | 37.9 | 5.2 | 61.7 | 9.9 | 13.5 | 2.4 | 85.2 | 8.9 | 99.0 | 9.0 | 99.5 | 15.7 |
| AD-464859 | 38.5 | 9.2 | 61.1 | 10.1 | 28.9 | 3.0 | 91.2 | 11.1 | 54.1 | 3.1 | 89.0 | 10.0 |
| AD-476032 | 39.6 | 9.1 | 84.8 | 14.5 | 86.3 | 10.0 | 108.8 | 8.7 | 43.8 | 4.7 | 99.9 | 11.8 |
| AD-464586 | 41.3 | 10.3 | 108.5 | 23.4 | 56.3 | 6.8 | 101.8 | 9.5 | 97.8 | 5.6 | 106.0 | 10.7 |
| AD-476146 | 41.5 | 4.4 | 108.9 | 17.7 | 90.1 | 5.5 | 99.6 | 1.7 | 43.6 | 6.0 | 95.9 | 7.1 |
| AD-464856 | 41.7 | 12.9 | 50.5 | 17.3 | 25.5 | 4.0 | 99.8 | 4.4 | 42.1 | 4.4 | 99.4 | 8.3 |
| AD-476344 | 42.8 | 11.8 | 81.9 | 10.6 | 23.9 | 1.2 | 83.5 | 10.4 | 9.1 | 2.6 | 48.0 | 8.0 |
| AD-475966 | 43.0 | 8.2 | 96.4 | 9.7 | 63.6 | 7.0 | 91.4 | 13.2 | 65.1 | 10.7 | 101.3 | 5.2 |
| AD-475666 | 44.9 | 10.4 | 72.2 | 7.1 | 24.3 | 4.0 | 75.5 | 10.6 | 18.6 | 2.5 | 77.9 | 9.5 |
| AD-464592 | 53.1 | 16.6 | 119.9 | 25.1 | 62.8 | 5.4 | 94.9 | 15.3 | 80.9 | 2.7 | 92.7 | 9.2 |
| AD-464813 | 53.2 | 4.5 | 92.1 | 21.7 | 59.7 | 9.4 | 98.0 | 13.6 | 71.0 | 6.3 | 96.0 | 5.5 |
| AD-475663 | 61.0 | 8.9 | 93.0 | 6.3 | 43.1 | 4.5 | 89.0 | 6.0 | 57.6 | 8.1 | 89.8 | 7.8 |
| AD-475765 | 63.8 | 9.7 | 102.6 | 18.3 | 98.8 | 6.0 | 100.3 | 8.0 | 73.7 | 6.3 | 106.0 | 12.3 |
| AD-476309 | 67.4 | 12.7 | 87.8 | 4.7 | 70.1 | 5.1 | 91.1 | 4.7 | 70.9 | 6.1 | 94.3 | 15.3 |
| AD-476029 | 68.2 | 3.0 | 78.4 | 6.7 | 78.3 | 5.3 | 94.0 | 9.4 | 38.1 | 2.5 | 107.4 | 7.6 |
| AD-465065 | 68.3 | 12.5 | 60.5 | 8.7 | 73.8 | 10.7 | 79.5 | 9.1 | 101.8 | 9.7 | 88.9 | 9.0 |
| AD-466386 | 73.5 | 8.1 | 64.2 | 11.0 | 77.2 | 4.4 | 91.3 | 8.5 | 106.6 | 8.3 | 90.2 | 10.3 |
| AD-465064 | 75.8 | 11.7 | 77.1 | 15.0 | 71.0 | 3.2 | 95.3 | 7.4 | 98.3 | 8.6 | 90.7 | 3.3 |
| AD-476026 | 80.7 | 9.5 | 109.7 | 20.4 | 112.1 | 18.3 | 111.8 | 3.5 | 70.3 | 7.5 | 95.3 | 10.8 |
| AD-465068 | 81.9 | 16.9 | 78.5 | 21.0 | 80.2 | 11.1 | 90.1 | 13.7 | 108.7 | 8.7 | 102.3 | 5.5 |
| AD-476025 | 84.6 | 3.5 | 102.2 | 5.8 | 100.8 | 4.3 | 94.8 | 6.8 | 93.6 | 10.5 | 107.8 | 3.9 |
| AD-476027 | 88.6 | 3.1 | 117.3 | 10.9 | 109.5 | 20.6 | 93.8 | 11.1 | 80.1 | 5.7 | 102.7 | 4.5 |
| AD-475953 | 89.7 | 7.4 | 95.5 | 13.6 | 100.6 | 7.7 | 98.2 | 8.1 | 93.4 | 4.8 | 110.5 | 11.4 |
| AD-475942 | 92.5 | 3.4 | 97.0 | 16.9 | 129.1 | 10.0 | 101.1 | 11.4 | 126.0 | 10.1 | 97.4 | 5.9 |
| AD-476030 | 92.8 | 2.7 | 107.2 | 10.7 | 103.8 | 10.8 | 97.9 | 8.7 | 63.9 | 8.1 | 101.7 | 11.2 |
| AD-465760 | 92.9 | 5.3 | 72.5 | 13.6 | 73.6 | 9.4 | 91.9 | 5.7 | 89.6 | 12.9 | 83.0 | 8.1 |
| AD-466384 | 94.1 | 12.0 | 75.8 | 14.8 | 61.3 | 6.9 | 94.5 | 10.2 | 89.9 | 16.9 | 90.9 | 10.0 |
| AD-475941 | 94.6 | 9.2 | 115.1 | 8.7 | 116.2 | 5.2 | 100.1 | 13.2 | 110.8 | 9.1 | 99.9 | 3.1 |
| AD-475952 | 95.8 | 13.5 | 89.8 | 11.8 | 118.0 | 4.3 | 108.0 | 15.3 | 90.7 | 11.4 | 103.0 | 7.7 |
| AD-475954 | 96.9 | 12.2 | 87.9 | 12.3 | 118.4 | 6.4 | 90.5 | 4.5 | 93.9 | 18.0 | 95.2 | 13.3 |
| AD-475888 | 97.2 | 16.5 | 80.5 | 13.3 | 100.1 | 7.8 | 89.9 | 8.9 | 94.4 | 16.8 | 103.3 | 22.8 |
| AD-475955 | 104.8 | 21.4 | 80.9 | 13.1 | 101.3 | 18.7 | 98.1 | 11.8 | 83.0 | 3.1 | 89.2 | 7.8 |
| AD-465757 | 106.5 | 15.0 | 67.5 | 14.5 | 93.7 | 9.8 | 91.9 | 16.0 | 105.8 | 7.0 | 105.2 | 6.4 |
| AD-465691 | 109.1 | 9.2 | 68.9 | 14.5 | 99.2 | 1.1 | 99.4 | 7.8 | 98.9 | 22.0 | 94.3 | 9.1 |
| AD-465918 | 109.3 | 7.2 | 92.0 | 26.8 | 85.1 | 11.6 | 92.4 | 7.3 | 96.2 | 8.6 | 90.1 | 13.1 |
| AD-465876 | 110.7 | 25.5 | 97.4 | 11.6 | 83.4 | 12.9 | 102.9 | 9.9 | 80.1 | 4.1 | 98.2 | 13.6 |
| AD-466443 | 113.2 | 16.5 | 111.0 | 26.1 | 57.9 | 0.9 | 98.6 | 5.1 | 98.7 | 12.8 | 95.2 | 9.4 |
| AD-475646 | 116.5 | 27.4 | 100.7 | 9.6 | 117.7 | 21.4 | 96.3 | 8.7 | 37.9 | 5.5 | 92.1 | 12.2 |
| AD-465784 | 118.8 | 8.0 | 109.4 | 30.2 | 91.8 | 8.4 | 110.0 | 11.8 | 105.4 | 1.7 | 94.9 | 7.6 |
| AD-465168 | 120.6 | 33.0 | 108.7 | 24.8 | 73.1 | 5.5 | 93.7 | 13.3 | 102.7 | 16.0 | 95.9 | 9.9 |
| AD-464559 | 122.2 | 17.6 | 106.8 | 12.7 | 93.4 | 11.6 | 91.8 | 9.4 | 83.9 | 6.2 | 89.1 | 12.8 |
| AD-475761 | 125.8 | 25.8 | 116.8 | 9.6 | 89.2 | 14.2 | 94.9 | 8.7 | 58.3 | 7.9 | 103.6 | 13.8 |
| AD-476058 | 131.7 | 10.3 | 114.8 | 18.4 | 59.7 | 9.8 | 100.3 | 4.7 | 41.0 | 5.3 | 97.1 | 13.5 |
| AD-465785 | 135.4 | 10.8 | 123.3 | 28.8 | 107.0 | 8.2 | 109.9 | 5.4 | 83.6 | 5.2 | 89.6 | 8.7 |
| AD-465919 | 136.8 | 23.8 | 107.3 | 24.2 | 91.1 | 10.8 | 93.2 | 10.3 | 93.4 | 18.3 | 91.0 | 3.7 |
| AD-465756 | 137.5 | 19.4 | 107.6 | 8.6 | 95.0 | 17.0 | 108.3 | 15.6 | 100.3 | 6.7 | 95.4 | 6.1 |
| AD-476061 | 142.2 | 18.5 | 123.1 | 10.8 | 87.3 | 5.9 | 90.1 | 9.4 | 22.4 | 2.4 | 75.2 | 3.7 |
| AD-465794 | 145.7 | 20.9 | 118.6 | 30.0 | 100.8 | 6.9 | 100.0 | 4.1 | 111.9 | 1.7 | 97.2 | 7.8 |
| AD-466320 | 151.5 | 15.4 | 116.2 | 15.8 | 85.3 | 8.8 | 90.4 | 8.9 | 95.9 | 18.8 | 102.1 | 7.5 |
| AD-476192 | 157.9 | 27.5 | 122.1 | 3.2 | 100.6 | 5.4 | 92.1 | 7.3 | 70.6 | 11.2 | 104.4 | 6.1 |

TABLE 8
In Vivo Evaluation of SNCA RNAi Agents in Human SNCA AAV-Transduced Mice (see FIG. 1)

| | Duplex ID | | | | | | | | | | | | |
|---|---|---|---|---|---|---|---|---|---|---|---|---|---|
| | PBS | | | | | | PBS | | | | | | |
| | control | | | | | | control | | | | | | |
| | (in 3′UTR | AD- | AD- | AD- | AD- | AD- | (in CDS | AD- | AD- | AD- | AD- | AD- | AD- |
| | expt) | 464778 | 464782 | 464694 | 464634 | 464779 | expt) | 464590 | 464313 | 464314 | 464585 | 464586 | 464592 |
| Target | — | 3′UTR | 3′UTR | 3′UTR | 3′UTR | 3′UTR | — | CDS | CDS | CDS | CDS | CDS | CDS |
| Sequence | | | | | | | | | | | | | |
| Average | 1 | 0.3458 | 0.3031 | 0.1705 | 0.1703 | 0.4016 | 1 | 0.86 | 0.7 | 0.27 | 0.655 | 0.7075 | 0.7575 |
| transcript | | | | | | | | | | | | | |
| remaining | | | | | | | | | | | | | |
| SD | 0.3905 | 0.1237 | 0.05679 | 0.04853 | 0.03625 | 0.1588 | 0.3201 | 0.5602 | 0.1219 | 0.07118 | 0.1698 | 0.2002 | 0.1513 |

TABLE 9
Modified Duplex Sequences Dosed to Mice.

| | | | | SEQ ID |
|---|---|---|---|---|
| Duplex Id | Oligo Id | Strand | Oligonucleotide Sequence | NO |
| AD-464634 | A-901590 | sense | asgsuuucUfuGfAfGfaucugcugaaL96 | 1821 |
| | A-901591 | antisense | VPusUfscagCfaGfAfucucAfaGfaaacusgsg | 1822 |
| AD-464314 | A-900954 | sense | asasgaggGfuGfUfUfcucuauguaaL96 | 1823 |
| | A-900955 | antisense | VPusUfsacaUfaGfAfgaacAfcCfcucuususu | 1824 |

TABLE 10
Mouse In Vivo SNCA Knockdown Results, at Days 7 and 14,
at 3 mg/kg and 10 mg/kg Duplex Dosage. (see FIG. 3)

| | | % Message | | |
|---|---|---|---|---|
| Duplex | siRNA treatment | Remaining | SD | Sample |
| PBS | Day 7 | 100.00 | 24.96 | Liver |
| Naïve | Day 7 | 108.10 | 21.00 | Liver |
| 3′UTR AD- | Dosed at 3 mg/kg; | 18.43 | 7.30 | Liver |
| 464634 | Measured at Day 7 | | | |
| 3′UTR AD- | Dosed at 10 mg/kg; | 17.72 | 10.28 | Liver |
| 464634 | Measured at Day 7 | | | |
| CDS AD-464314 | Dosed at 3 mg/kg; | 31.26 | 4.80 | Liver |
| | Measured at Day 7 | | | |
| CDS AD-464314 | Dosed at 10 mg/kg; | 5.94 | 3.07 | Liver |
| | Measured at Day 7 | | | |
| PBS | Day 14 | 100.00 | 4.83 | Liver |
| Naïve | Day 14 | 96.37 | 13.39 | Liver |
| 3′UTR AD- | Dosed at 3 mg/kg; | 36.04 | 8.31 | Liver |
| 464634 | Measured at Day 14 | | | |
| 3′UTR AD- | Dosed at 10 mg/kg; | 17.02 | 6.08 | Liver |
| 464634 | Measured at Day 14 | | | |
| CDS AD-464314 | Dosed at 3 mg/kg; | 36.63 | 5.77 | Liver |
| | Measured at Day 14 | | | |
| CDS AD-464314 | Dosed at 10 mg/kg; | 24.01 | 12.75 | Liver |
| | Measured at Day 14 | | | |

TABLE 11
Mouse/Rat Cross-Reactivity of SNCA RNAi Agents in
Rat SNCA-AAV Overexpressing Mice (see FIG. 5)

| | Duplex ID | | | | | | | |
|---|---|---|---|---|---|---|---|---|
| | PBS | AD- | AD- | AD- | AD- | AD- | AD- | AD- |
| | control | 476344 | 475666 | 476306 | 476061 | 464814 | 475728 | 464229 |
| n | 3 | 4 | 4 | 4 | 4 | 4 | 4 | 4 |
| Average | 1.0000 | 0.7400 | 0.7035 | 0.6834 | 0.3006 | 0.3913 | 0.3790 | 0.5237 |
| transcript | | | | | | | | |
| remaining | | | | | | | | |
| SD | 0.4991 | 0.09166 | 0.1783 | 0.3062 | 0.1151 | 0.07808 | 0.1154 | 0.3044 |

TABLE 12
Further SNCA-Targeting Duplex Sequences, Modified.

| Duplex | Sense | | SEQ ID | Antisense | | SEQ ID | mRNA Target | SEQ ID |
|---|---|---|---|---|---|---|---|---|
| Name | Oligo Name | Oligo Sequence | NO: | Oligo Name | Oligo Sequence | NO: | Sequence | NO: |
| AD- | A- | gsascga(Chd)agUfGfU | 1825 | A-2860863 | VPusdCsuudTadCaccad | 2180 | UCGACGACAGUGU | 2535 |
| 1548843.1 | 2860862 | fgguguaaagaL96 | | | CaCfugucgucsgsa | | GGUGUAAAGG | |
| AD- | A- | ascsgac(Ahd)guGfUf | 1826 | A-2860865 | VPusdCscudTudAcacc | 2181 | CGACGACAGUGUG | 2536 |
| 1548844.1 | 2860864 | GfguguaaaggaL96 | | | dAcAfcugucguscsg | | GUGUAAAGGA | |
| AD- | A- | csgsaca(Ghd)ugUfGf | 1827 | A-2860867 | VPusdTsccdTudTacacd | 2182 | GACGACAGUGUGG | 2537 |
| 1548845.1 | 2860866 | GfuguaaaggaaL96 | | | CaCfacugucgsusc | | UGUAAAGGAA | |
| AD- | A- | usgsugg(Uhd)guAfAf | 1828 | A-2860879 | VPusdAsugdAadTuccu | 2183 | AGUGUGGUGUAAA | 2538 |
| 1548851.1 | 2860878 | AfggaauucauaL96 | | | dTuAfcaccacascsu | | GGAAUUCAUU | |
| AD- | A- | gsgsugu(Ahd)aaGfGf | 1829 | A-2860885 | VPusdCsuadAudGaauu | 2184 | GUGGUGUAAAGGA | 2539 |
| 1548854.1 | 2860884 | AfauucauuagaL96 | | | dCcUfuuacaccsasc | | AUUCAUUAGC | |
| AD- | A- | asusuag(Chd)caUfGfG | 1830 | A-2860915 | VPusdTsgadAudAcauc | 2185 | UCAUUAGCCAUGG | 2540 |
| 1548869.1 | 2860914 | fauguauucaaL96 | | | dCaUfggcuaausgsa | | AUGUAUUCAU | |
| AD- | A- | ususagc(Chd)auGfGf | 1831 | A-2860917 | VPusdAsugdAadTacau | 2186 | CAUUAGCCAUGGA | 2541 |
| 1548870.1 | 2860916 | AfuguauucauaL96 | | | dCcAfuggcuaasusg | | UGUAUUCAUG | |
| AD- | A- | asusgga(Uhd)guAfUf | 1832 | A-2860929 | VPusdCscudTudCauga | 2187 | CCAUGGAUGUAUU | 2542 |
| 1548876.1 | 2860928 | UfcaugaaaggaL96 | | | dAuAfcauccausgsg | | CAUGAAAGGA | |
| AD- | A- | asusuca(Uhd)gaAfAf | 1833 | A-2860945 | VPusdTsugdAadAgucc | 2188 | GUAUUCAUGAAAG | 2543 |
| 1548884.1 | 2860944 | GfgacuuucaaaL96 | | | dTuUfcaugaausasc | | GACUUUCAAA | |
| AD- | A- | uscsaug(Ahd)aaGfGf | 1834 | A-2860949 | VPusdCsuudTgdAaagu | 2189 | AUUCAUGAAAGGA | 2544 |
| 1548886.1 | 2860948 | AfcuuucaaagaL96 | | | dCcUfuucaugasasu | | CUUUCAAAGG | |
| AD- | A- | csasuga(Ahd)agGfAfC | 1835 | A-2860951 | VPusdCscudTudGaaag | 2190 | UUCAUGAAAGGAC | 2545 |
| 1548887.1 | 2860950 | fuuucaaaggaL96 | | | dTcCfuuucaugsasa | | UUUCAAAGGC | |
| AD- | A- | asusgaa(Ahd)ggAfCf | 1836 | A-2860953 | VPusdGsccdTudTgaaad | 2191 | UCAUGAAAGGACU | 2546 |
| 1548888.1 | 2860952 | UfuucaaaggcaL96 | | | GuCfcuuucausgsa | | UUCAAAGGCC | |
| AD- | A- | asgsagg(Ghd)ugUfUf | 1837 | A-2861127 | VPusdCsuadCadTagag | 2192 | AAAGAGGGUGUUC | 2547 |
| 1548975.1 | 2861126 | CfucuauguagaL96 | | | dAaCfacccucususu | | UCUAUGUAGG | |
| AD- | A- | gsasggg(Uhd)guUfCf | 1838 | A-2861129 | VPusdCscudAcdAuaga | 2193 | AAGAGGGUGUUCU | 2548 |
| 1548976.1 | 2861128 | UfcuauguaggaL96 | | | dGaAfcacccucsusu | | CUAUGUAGGC | |
| AD- | A- | gsgsgug(Uhd)ucUfCf | 1839 | A-2861133 | VPusdAsgcdCudAcaua | 2194 | GAGGGUGUUCUCU | 2549 |
| 1548978.1 | 2861132 | UfauguaggcuaL96 | | | dGaGfaacacccsusc | | AUGUAGGCUC | |
| AD- | A- | usgsgcu(Ghd)agAfAf | 1840 | A-2861251 | VPusdCsucdTudTgguc | 2195 | AGUGGCUGAGAAG | 2550 |
| 1549037.1 | 2861250 | GfaccaaagagaL96 | | | dTuCfucagccascsu | | ACCAAAGAGC | |
| AD- | A- | gsgscug(Ahd)gaAfGf | 1841 | A-2861253 | VPusdGscudCudTuggu | 2196 | GUGGCUGAGAAGA | 2551 |
| 1549038.1 | 2861252 | AfccaaagagcaL96 | | | dCuUfcucagcosasc | | CCAAAGAGCA | |
| AD- | A- | gsasaga(Chd)caAfAfG | 1842 | A-2861265 | VPusdTscadCudTgcucd | 2197 | GAGAAGACCAAAG | 2552 |
| 1549044.1 | 2861264 | fagcaagugaaL96 | | | TuUfggucuucsusc | | AGCAAGUGAC | |
| AD- | A- | asasgag(Chd)aaGfUfG | 1843 | A-2861281 | VPusdAsacdAudTuguc | 2198 | CAAAGAGCAAGUG | 2553 |
| 1549052.1 | 2861280 | facaaauguuaL96 | | | dAcUfugcucuususg | | ACAAAUGUUG | |
| AD- | A- | asgsagc(Ahd)agUfGf | 1844 | A-2861283 | VPusdCsaadCadTuugu | 2199 | AAAGAGCAAGUGA | 2554 |
| 1549053.1 | 2861282 | AfcaaauguugaL96 | | | dCaCfuugcucususu | | CAAAUGUUGG | |
| AD- | A- | gsasgca(Ahd)guGfAf | 1845 | A-2861285 | VPusdCscadAcdAuuug | 2200 | AAGAGCAAGUGAC | 2555 |
| 1549054.1 | 2861284 | CfaaauguuggaL96 | | | dTcAfcuugcucsusu | | AAAUGUUGGA | |
| AD- | A- | asgscaa(Ghd)ugAfCfA | 1846 | A-2861287 | VPusdTsccdAadCauuu | 2201 | AGAGCAAGUGACA | 2556 |
| 1549055.1 | 2861286 | faauguuggaaL96 | | | dGuCfacuugcuscsu | | AAUGUUGGAG | |
| AD- | A- | uscscug(Ahd)caAfUf | 1847 | A-2861597 | VPusdCsaudAadGccuc | 2202 | GAUCCUGACAAUG | 2557 |
| 1549210.1 | 2861596 | GfaggcuuaugaL96 | | | dAuUfgucaggasusc | | AGGCUUAUGA | |
| AD- | A- | cscsuga(Chd)aaUfGfA | 1848 | A-2861599 | VPusdTscadTadAgccud | 2203 | AUCCUGACAAUGA | 2558 |
| 1549211.1 | 2861598 | fggcuuaugaaL96 | | | CaUfugucaggsasu | | GGCUUAUGAA | |
| AD- | A- | csusgac(Ahd)auGfAf | 1849 | A-2861601 | VPusdTsucdAudAagcc | 2204 | UCCUGACAAUGAG | 2559 |
| 1549212.1 | 2861600 | GfgcuuaugaaaL96 | | | dTcAfuugucagsgsa | | GCUUAUGAAA | |
| AD- | A- | csasaug(Ahd)ggCfUf | 1850 | A-2861609 | VPusdGscadTudTcauad | 2205 | GACAAUGAGGCUU | 2560 |
| 1549216.1 | 2861608 | UfaugaaaugcaL96 | | | AgCfcucauugsusc | | AUGAAAUGCC | |
| AD- | A- | asasuga(Ghd)gcUfUf | 1851 | A-2861611 | VPusdGsgcdAudTucau | 2206 | ACAAUGAGGCUUA | 2561 |
| 1549217.1 | 2861610 | AfugaaaugccaL96 | | | dAaGfccucauusgsu | | UGAAAUGCCU | |
| AD- | A- | gsgscuu(Ahd)ugAfAf | 1852 | A-2861621 | VPusdCsagdAadGgcau | 2207 | GAGGCUUAUGAAA | 2562 |
| 1549222.1 | 2861620 | AfugccuucugaL96 | | | dTuCfauaagccsusc | | UGCCUUCUGA | |
| AD- | A- | csusuau(Ghd)aaAfUf | 1853 | A-2861625 | VPusdCsucdAgdAaggc | 2208 | GGCUUAUGAAAUG | 2563 |
| 1549224.1 | 2861624 | GfccuucugagaL96 | | | dAuUfucauaagscsc | | CCUUCUGAGG | |
| AD- | A- | ususaug(Ahd)aaUfGf | 1854 | A-2861627 | VPusdCscudCadGaagg | 2209 | GCUUAUGAAAUGC | 2564 |
| 1549225.1 | 2861626 | CfcuucugaggaL96 | | | dCaUfuucauaasgsc | | CUUCUGAGGA | |
| AD- | A- | asasggg(Uhd)auCfAf | 1855 | A-2861667 | VPusdTsucdGudAgucu | 2210 | GGAAGGGUAUCAA | 2565 |
| 1549245.1 | 2861666 | AfgacuacgaaaL96 | | | dTgAfuacccuuscsc | | GACUACGAAC | |
| AD- | A- | asgsggu(Ahd)ucAfAf | 1856 | A-2861669 | VPusdGsuudCgdTaguc | 2211 | GAAGGGUAUCAAG | 2566 |
| 1549246.1 | 2861668 | GfacuacgaacaL96 | | | dTuGfauacccususc | | ACUACGAACC | |
| AD- | A- | gsusauc(Ahd)agAfCf | 1857 | A-2861675 | VPusdCsagdGudTcgua | 2212 | GGGUAUCAAGACU | 2567 |
| 1549249.1 | 2861674 | UfacgaaccugaL96 | | | dGuCfuugauacscsc | | ACGAACCUGA | |
| AD- | A- | ascscug(Ahd)agCfCfU | 1858 | A-2861705 | VPusdAsuadTudTcuua | 2213 | GAACCUGAAGCCU | 2568 |
| 1549264.1 | 2861704 | faagaaauauaL96 | | | dGgCfuucaggususc | | AAGAAAUAUC | |
| AD- | A- | cscsuga(Ahd)gcCfUfA | 1859 | A-2861707 | VPusdGsaudAudTucuu | 2214 | AACCUGAAGCCUA | 2569 |
| 1549265.1 | 2861706 | fagaaauaucaL96 | | | dAgGfcuucaggsusu | | AGAAAUAUCU | |
| AD- | A- | csusgaa(Ghd)ccUfAfA | 1860 | A-2861709 | VPusdAsgadTadTuucu | 2215 | ACCUGAAGCCUAA | 2570 |
| 1549266.1 | 2861708 | fgaaauaucuaL96 | | | dTaGfgcuucagsgsu | | GAAAUAUCUU | |
| AD- | A- | usgsaag(Chd)cuAfAf | 1861 | A-2861711 | VPusdAsagdAudAuuuc | 2216 | CCUGAAGCCUAAG | 2571 |
| 1549267.1 | 2861710 | GfaaauaucuuaL96 | | | dTuAfggcuucasgsg | | AAAUAUCUUU | |
| AD | A- | gsasagc(Chd)uaAfGfA | 1862 | A-2861713 | VPusdAsaadGadTauuu | 2217 | CUGAAGCCUAAGA | 2572 |
| 1549268.1 | 2861712 | faauaucuuuaL96 | | | dCuUfaggcuucsasg | | AAUAUCUUUG | |
| AD- | A- | asasgcc(Uhd)aaGfAfA | 1863 | A-2861715 | VPusdCsaadAgdAuauu | 2218 | UGAAGCCUAAGAA | 2573 |
| 1549269.1 | 2861714 | fauaucuuugaL96 | | | dTcUfuaggcuuscsa | | AUAUCUUUGC | |
| AD- | A- | asgsccu(Ahd)agAfAf | 1864 | A-2861717 | VPusdGscadAadGauau | 2219 | GAAGCCUAAGAAA | 2574 |
| 1549270.1 | 2861716 | AfuaucuuugcaL96 | | | dTuCfuuaggcususc | | UAUCUUUGCU | |
| AD- | A- | gscscua(Ahd)gaAfAf | 1865 | A-2861719 | VPusdAsgcdAadAgaua | 2220 | AAGCCUAAGAAAU | 2575 |
| 1549271.1 | 2861718 | UfaucuuugcuaL96 | | | dTuUfcuuaggcsusu | | AUCUUUGCUC | |
| AD- | A- | cscsuaa(Ghd)aaAfUfA | 1866 | A-2861721 | VPusdGsagdCadAagau | 2221 | AGCCUAAGAAAUA | 2576 |
| 1549272.1 | 2861720 | fucuuugcucaL96 | | | dAuUfucuuaggscsu | | UCUUUGCUCC | |
| AD- | A- | asusauc(Uhd)uuGfCf | 1867 | A-2861737 | VPusdGsaadAcdTggga | 2222 | AAAUAUCUUUGCU | 2577 |
| 1549280.1 | 2861736 | UfcccaguuucaL96 | | | dGcAfaagauaususu | | CCCAGUUUCU | |
| AD- | A- | usasucu(Uhd)ugCfUf | 1868 | A-2861739 | VPusdAsgadAadCuggg | 2223 | AAUAUCUUUGCUC | 2578 |
| 1549281.1 | 2861738 | CfccaguuucuaL96 | | | dAgCfaaagauasusu | | CCAGUUUCUU | |
| AD- | A- | asuscuu(Uhd)gcUfCfC | 1869 | A-2861741 | VPusdAsagdAadAcugg | 2224 | AUAUCUUUGCUCC | 2579 |
| 1549282.1 | 2861740 | fcaguuucuuaL96 | | | dGaGfcaaagausasu | | CAGUUUCUUG | |
| AD- | A- | uscsuuu(Ghd)cuCfCfC | 1870 | A-2861743 | VPusdCsaadGadAacug | 2225 | UAUCUUUGCUCCC | 2580 |
| 1549283.1 | 2861742 | faguuucuugaL96 | | | dGgAfgcaaagasusa | | AGUUUCUUGA | |
| AD- | A- | csusuug(Chd)ucCfCfA | 1871 | A-2861745 | VPusdTscadAgdAaacu | 2226 | AUCUUUGCUCCCA | 2581 |
| 1549284.1 | 2861744 | fguuucuugaaL96 | | | dGgGfagcaaagsasu | | GUUUCUUGAG | |
| AD- | A- | ususugc(Uhd)ccCfAf | 1872 | A-2861747 | VPusdCsucdAadGaaac | 2227 | UCUUUGCUCCCAG | 2582 |
| 1549285.1 | 2861746 | GfuuucuugagaL96 | | | dTgGfgagcaaasgsa | | UUUCUUGAGA | |
| AD- | A- | uscscca(Ghd)uuUfCfU | 1873 | A-2861757 | VPusdCsagdAudCucaa | 2228 | GCUCCCAGUUUCU | 2583 |
| 1549290.1 | 2861756 | fugagaucugaL96 | | | dGaAfacugggasgsc | | UGAGAUCUGC | |
| AD- | A- | csasguu(Uhd)cuUfGf | 1874 | A-2861763 | VPusdCsagdCadGaucu | 2229 | CCCAGUUUCUUGA | 2584 |
| 1549293.1 | 2861762 | AfgaucugcugaL96 | | | dCaAfgaaacugsgsg | | GAUCUGCUGA | |
| AD- | A- | asasgug(Chd)ucAfGf | 1875 | A-2861843 | VPusdCsacdAudTggaa | 2230 | ACAAGUGCUCAGU | 2585 |
| 1549333.1 | 2861842 | UfuccaaugugaL96 | | | dCuGfagcacuusgsu | | UCCAAUGUGC | |
| AD- | A- | asgsugc(Uhd)caGfUf | 1876 | A-2861845 | VPusdGscadCadTugga | 2231 | CAAGUGCUCAGUU | 2586 |
| 1549334.1 | 2861844 | UfccaaugugcaL96 | | | dAcUfgagcacususg | | CCAAUGUGCC | |
| AD- | A- | usgsccc(Ahd)guCfAf | 1877 | A-2861879 | VPusdAsgadAadTguca | 2232 | UGUGCCCAGUCAU | 2587 |
| 1549351.1 | 2861878 | UfgacauuucuaL96 | | | dTgAfcugggcascsa | | GACAUUUCUC | |
| AD- | A- | gscscca(Ghd)ucAfUfG | 1878 | A-2861881 | VPusdGsagdAadAuguc | 2233 | GUGCCCAGUCAUG | 2588 |
| 1549352.1 | 2861880 | facauuucucaL96 | | | dAuGfacugggcsasc | | ACAUUUCUCA | |
| AD- | A- | cscscag(Uhd)caUfGfA | 1879 | A-2861883 | VPusdTsgadGadAaugu | 2234 | UGCCCAGUCAUGA | 2589 |
| 1549353.1 | 2861882 | fcauuucucaaL96 | | | dCaUfgacugggscsa | | CAUUUCUCAA | |
| AD- | A- | cscsagu(Chd)auGfAfC | 1880 | A-2861885 | VPusdTsugdAgdAaaug | 2235 | GCCCAGUCAUGAC | 2590 |
| 1549354.1 | 2861884 | fauuucucaaaL96 | | | dTcAfugacuggsgsc | | AUUUCUCAAA | |
| AD- | A- | gsuscau(Ghd)acAfUf | 1881 | A-2861891 | VPusdAscudTudGagaa | 2236 | CAGUCAUGACAUU | 2591 |
| 1549357.1 | 2861890 | UfucucaaaguaL96 | | | dAuGfucaugacsusg | | UCUCAAAGUU | |
| AD- | A- | csasuga(Chd)auUfUfC | 1882 | A-2861895 | VPusdAsaadCudTugag | 2237 | GUCAUGACAUUUC | 2592 |
| 1549359.1 | 2861894 | fucaaaguuuaL96 | | | dAaAfugucaugsasc | | UCAAAGUUUU | |
| AD- | A- | uscsgaa(Ghd)ucUfUfC | 1883 | A-2861959 | VPusdCsugdCudGaugg | 2238 | UCUCGAAGUCUUC | 2593 |
| 1549391.1 | 2861958 | fcaucagcagaL96 | | | dAaGfacuucgasgsa | | CAUCAGCAGU | |
| AD- | A- | uscsuuc(Chd)auCfAfG | 1884 | A-2861971 | VPusdCsaadTcdAcugc | 2239 | AGUCUUCCAUCAG | 2594 |
| 1549397.1 | 2861970 | fcagugauugaL96 | | | dTgAfuggaagascsu | | CAGUGAUUGA | |
| AD- | A- | uscscau(Chd)agCfAfG | 1885 | A-2861977 | VPusdCsuudCadAucac | 2240 | CUUCCAUCAGCAG | 2595 |
| 1549400.1 | 2861976 | fugauugaagaL96 | | | dTgCfugauggasasg | | UGAUUGAAGU | |
| AD- | A- | cscsauc(Ahd)gcAfGfU | 1886 | A-2861979 | VPusdAscudTcdAauca | 2241 | UUCCAUCAGCAGU | 2596 |
| 1549401.1 | 2861978 | fgauugaaguaL96 | | | dCuGfcugauggsasa | | GAUUGAAGUA | |
| AD- | A- | asuscag(Chd)agUfGfA | 1887 | A-2861983 | VPusdAsuadCudTcaau | 2242 | CCAUCAGCAGUGA | 2597 |
| 1549403.1 | 2861982 | fuugaaguauaL96 | | | dCaCfugcugausgsg | | UUGAAGUAUC | |
| AD- | A- | asgscag(Uhd)gaUfUf | 1888 | A-2861989 | VPusdCsagdAudAcuuc | 2243 | UCAGCAGUGAUUG | 2598 |
| 1549406.1 | 2861988 | GfaaguaucugaL96 | | | dAaUfcacugcusgsa | | AAGUAUCUGU | |
| AD- | A- | gscsagu(Ghd)auUfGf | 1889 | A-2861991 | VPusdAscadGadTacuu | 2244 | CAGCAGUGAUUGA | 2599 |
| 1549407.1 | 2861990 | AfaguaucuguaL96 | | | dCaAfucacugcsusg | | AGUAUCUGUA | |
| AD- | A- | gsasuug(Ahd)agUfAf | 1890 | A-2862001 | VPusdCsagdGudAcaga | 2245 | GUGAUUGAAGUAU | 2600 |
| 1549412.1 | 2862000 | UfcuguaccugaL96 | | | dTaCfuucaaucsasc | | CUGUACCUGC | |
| AD- | A- | ususcgg(Uhd)gcUfUf | 1891 | A-2862027 | VPusdAsgudGadAaggg | 2246 | AUUUCGGUGCUUC | 2601 |
| 1549425.1 | 2862026 | CfccuuucacuaL96 | | | dAaGfcaccgaasasu | | CCUUUCACUG | |
| AD- | A- | uscsggu(Ghd)cuUfCf | 1892 | A-2862029 | VPusdCsagdTgdAaagg | 2247 | UUUCGGUGCUUCC | 2602 |
| 1549426.1 | 2862028 | CfcuuucacugaL96 | | | dGaAfgcaccgasasa | | CUUUCACUGA | |
| AD- | A- | csusucc(Chd)uuUfCfA | 1893 | A-2862041 | VPusdTscadCudTcagud | 2248 | UGCUUCCCUUUCA | 2603 |
| 1549432.1 | 2862040 | fcugaagugaaL96 | | | GaAfagggaagscsa | | CUGAAGUGAA | |
| AD- | A- | ususuca(Chd)ugAfAf | 1894 | A-2862053 | VPusdAsugdTadTucac | 2249 | CCUUUCACUGAAG | 2604 |
| 1549438.1 | 2862052 | GfugaauacauaL96 | | | dTuCfagugaaasgsg | | UGAAUACAUG | |
| AD- | A- | ususcac(Uhd)gaAfGf | 1895 | A-2862055 | VPusdCsaudGudAuuca | 2250 | CUUUCACUGAAGU | 2605 |
| 1549439.1 | 2862054 | UfgaauacaugaL96 | | | dCuUfcagugaasasg | | GAAUACAUGG | |
| AD- | A- | csascug(Ahd)agUfGf | 1896 | A-2862059 | VPusdAsccdAudGuauu | 2251 | UUCACUGAAGUGA | 2606 |
| 1549441.1 | 2862058 | AfauacaugguaL96 | | | dCaCfuucagugsasa | | AUACAUGGUA | |
| AD- | A- | ascsuga(Ahd)guGfAf | 1897 | A-2862061 | VPusdTsacdCadTguaud | 2252 | UCACUGAAGUGAA | 2607 |
| 1549442.1 | 2862060 | AfuacaugguaaL96 | | | TcAfcuucagusgsa | | UACAUGGUAG | |
| AD- | A- | csusgaa(Ghd)ugAfAf | 1898 | A-2862063 | VPusdCsuadCcdAugua | 2253 | CACUGAAGUGAAU | 2608 |
| 1549443.1 | 2862062 | UfacaugguagaL96 | | | dTuCfacuucagsusg | | ACAUGGUAGC | |
| AD- | A- | csusaag(Uhd)gaCfUfA | 1899 | A-2862211 | VPusdAsaudAadGuggu | 2254 | ACCUAAGUGACUA | 2609 |
| 1549517.1 | 2862210 | fccacuuauuaL96 | | | dAgUfcacuuagsgsu | | CCACUUAUUU | |
| AD- | A- | usasagu(Ghd)acUfAfC | 1900 | A-2862213 | VPusdAsaadTadAgugg | 2255 | CCUAAGUGACUAC | 2610 |
| 1549518.1 | 2862212 | fcacuuauuuaL96 | | | dTaGfucacuuasgsg | | CACUUAUUUC | |
| AD- | A- | asasgug(Ahd)cuAfCfC | 1901 | A-2862215 | VPusdGsaadAudAagug | 2256 | CUAAGUGACUACC | 2611 |
| 1549519.1 | 2862214 | facuuauuucaL96 | | | dGuAfgucacuusasg | | ACUUAUUUCU | |
| AD- | A- | asgsuga(Chd)uaCfCfA | 1902 | A-2862217 | VPusdAsgadAadTaagu | 2257 | UAAGUGACUACCA | 2612 |
| 1549520.1 | 2862216 | fcuuauuucuaL96 | | | dGgUfagucacususa | | CUUAUUUCUA | |
| AD- | A- | gsusgac(Uhd)acCfAfC | 1903 | A-2862219 | VPusdTsagdAadAuaag | 2258 | AAGUGACUACCAC | 2613 |
| 1549521.1 | 2862218 | fuuauuucuaaL96 | | | dTgGfuagucacsusu | | UUAUUUCUAA | |
| AD- | A- | usgsacu(Ahd)ccAfCfU | 1904 | A-2862221 | VPusdTsuadGadAauaa | 2259 | AGUGACUACCACU | 2614 |
| 1549522.1 | 2862220 | fuauuucuaaaL96 | | | dGuGfguagucascsu | | UAUUUCUAAA | |
| AD- | A- | ascsuac(Chd)acUfUfA | 1905 | A-2862225 | VPusdAsuudTadGaaau | 2260 | UGACUACCACUUA | 2615 |
| 1549524.1 | 2862224 | fuuucuaaauaL96 | | | dAaGfugguaguscsa | | UUUCUAAAUC | |
| AD- | A- | csusacc(Ahd)cuUfAfU | 1906 | A-2862227 | VPusdGsaudTudAgaaa | 2261 | GACUACCACUUAU | 2616 |
| 1549525.1 | 2862226 | fuucuaaaucaL96 | | | dTaAfgugguagsusc | | UUCUAAAUCC | |
| AD- | A- | ascscac(Uhd)uaUfUfU | 1907 | A-2862231 | VPusdAsggdAudTuaga | 2262 | CUACCACUUAUUU | 2617 |
| 1549527.1 | 2862230 | fcuaaauccuaL96 | | | dAaUfaaguggusasg | | CUAAAUCCUC | |
| AD- | A- | ususgcu(Ghd)uuGfUf | 1908 | A-2862259 | VPusdCsaadCudTcuga | 2263 | UGUUGCUGUUGUU | 2618 |
| 1549541.1 | 2862258 | UfcagaaguugaL96 | | | dAcAfacagcaascsa | | CAGAAGUUGU | |
| AD- | A- | usgscug(Uhd)ugUfUf | 1909 | A-2862261 | VPusdAscadAcdTucug | 2264 | GUUGCUGUUGUUC | 2619 |
| 1549542.1 | 2862260 | CfagaaguuguaL96 | | | dAaCfaacagcasasc | | AGAAGUUGUU | |
| AD- | A- | gscsugu(Uhd)guUfCf | 1910 | A-2862263 | VPusdAsacdAadCuucu | 2265 | UUGCUGUUGUUCA | 2620 |
| 1549543.1 | 2862262 | AfgaaguuguuaL96 | | | dGaAfcaacagcsasa | | GAAGUUGUUA | |
| AD- | A- | csusguu(Ghd)uuCfAf | 1911 | A-2862265 | VPusdTsaadCadAcuuc | 2266 | UGCUGUUGUUCAG | 2621 |
| 1549544.1 | 2862264 | GfaaguuguuaaL96 | | | dTgAfacaacagscsa | | AAGUUGUUAG | |
| AD- | A- | usgsuug(Uhd)ucAfGf | 1912 | A-2862267 | VPusdCsuadAcdAacuu | 2267 | GCUGUUGUUCAGA | 2622 |
| 1549545.1 | 2862266 | AfaguuguuagaL96 | | | dCuGfaacaacasgsc | | AGUUGUUAGU | |
| AD- | A- | gsusugu(Uhd)caGfAf | 1913 | A-2862269 | VPusdAscudAadCaacu | 2268 | CUGUUGUUCAGAA | 2623 |
| 1549546.1 | 2862268 | AfguuguuaguaL96 | | | dTcUfgaacaacsasg | | GUUGUUAGUG | |
| AD- | A- | ususguu(Chd)agAfAf | 1914 | A-2862271 | VPusdCsacdTadAcaacd | 2269 | UGUUGUUCAGAAG | 2624 |
| 549547.1 | 2862270 | GfuuguuagugaL96 | | | TuCfugaacaascsa | | UUGUUAGUGA | |
| AD- | A- | usgsuuc(Ahd)gaAfGf | 1915 | A-2862273 | VPusdTscadCudAacaad | 2270 | GUUGUUCAGAAGU | 2625 |
| 1549548.1 | 2862272 | UfuguuagugaaL96 | | | CuUfcugaacasasc | | UGUUAGUGAU | |
| AD- | A- | csasgaa(Ghd)uuGfUf | 1916 | A-2862281 | VPusdCsaadAudCacua | 2271 | UUCAGAAGUUGUU | 2626 |
| 1549552.1 | 2862280 | UfagugauuugaL96 | | | dAcAfacuucugsasa | | AGUGAUUUGC | |
| AD- | A- | gsasagu(Uhd)guUfAf | 1917 | A-2862285 | VPusdAsgcdAadAucac | 2272 | CAGAAGUUGUUAG | 2627 |
| 1549554.1 | 2862284 | GfugauuugcuaL96 | | | dTaAfcaacuucsusg | | UGAUUUGCUA | |
| AD- | A- | asasguu(Ghd)uuAfGf | 1918 | A-2862287 | VPusdTsagdCadAauca | 2273 | AGAAGUUGUUAGU | 2628 |
| 1549555.1 | 2862286 | UfgauuugcuaaL96 | | | dCuAfacaacuuscsu | | GAUUUGCUAU | |
| AD- | A- | asgsuug(Uhd)uaGfUf | 1919 | A-2862289 | VPusdAsuadGcdAaauc | 2274 | GAAGUUGUUAGUG | 2629 |
| 1549556.1 | 2862288 | GfauuugcuauaL96 | | | dAcUfaacaacususc | | AUUUGCUAUC | |
| AD- | A- | gsasuac(Uhd)guCfUf | 1920 | A-2862367 | VPusdCsaudTadTucuu | 2275 | AUGAUACUGUCUA | 2630 |
| 1549595.1 | 2862366 | AfagaauaaugaL96 | | | dAgAfcaguaucsasu | | AGAAUAAUGA | |
| AD- | A- | asusacu(Ghd)ucUfAf | 1921 | A-2862369 | VPusdTscadTudAuucu | 2276 | UGAUACUGUCUAA | 2631 |
| 1549596.1 | 2862368 | AfgaauaaugaaL96 | | | dTaGfacaguauscsa | | GAAUAAUGAC | |
| AD- | A- | ascsgua(Uhd)ugUfGf | 1922 | A-2862407 | VPusdTsaadCadAauuu | 2277 | UGACGUAUUGUGA | 2632 |
| 1549615.1 | 2862406 | AfaauuuguuaaL96 | | | dCaCfaauacguscsa | | AAUUUGUUAA | |
| AD- | A- | usasugu(Ghd)agCfAf | 1923 | A-2862433 | VPusdCsaudAgdTuuca | 2278 | AAUAUGUGAGCAU | 2633 |
| 1549628.1 | 2862432 | UfgaaacuaugaL96 | | | dTgCfucacauasusu | | GAAACUAUGC | |
| AD- | A- | usgsuga(Ghd)caUfGf | 1924 | A-2862437 | VPusdTsgcdAudAguuu | 2279 | UAUGUGAGCAUGA | 2634 |
| 1549630.1 | 2862436 | AfaacuaugcaaL96 | | | dCaUfgcucacasusa | | AACUAUGCAC | |
| AD- | A- | gsasaac(Uhd)auGfCfA | 1925 | A-2862455 | VPusdAsuudTadTaggu | 2280 | AUGAAACUAUGCA | 2635 |
| 1549639.1 | 2862454 | fccuauaaauaL96 | | | dGcAfuaguuucsasu | | CCUAUAAAUA | |
| AD- | A- | asasacu(Ahd)ugCfAfC | 1926 | A-2862457 | VPusdTsaudTudAuagg | 2281 | UGAAACUAUGCAC | 2636 |
| 1549640.1 | 2862456 | fcuauaaauaaL96 | | | dTgCfauaguuuscsa | | CUAUAAAUAC | |
| AD- | A- | asascua(Uhd)gcAfCfC | 1927 | A-2862459 | VPusdGsuadTudTauag | 2282 | GAAACUAUGCACC | 2637 |
| 1549641.1 | 2862458 | fuauaaauacaL96 | | | dGuGfcauaguususc | | UAUAAAUACU | |
| AD- | A- | ascsuau(Ghd)caCfCfU | 1928 | A-2862461 | VPusdAsgudAudTuaua | 2283 | AAACUAUGCACCU | 2638 |
| 1549642.1 | 2862460 | fauaaauacuaL96 | | | dGgUfgcauagususu | | AUAAAUACUA | |
| AD- | A- | csusaug(Chd)acCfUfA | 1929 | A-2862463 | VPusdTsagdTadTuuaud | 2284 | AACUAUGCACCUA | 2639 |
| 1549643.1 | 2862462 | fuaaauacuaaL96 | | | AgGfugcauagsusu | | UAAAUACUAA | |
| AD- | A- | csusugu(Ghd)uuUfGf | 1930 | A-2862541 | VPusdCsaudTudAuaua | 2285 | CACUUGUGUUUGU | 2640 |
| 1549682.1 | 2862540 | UfauauaaaugaL96 | | | dCaAfacacaagsusg | | AUAUAAAUGG | |
| AD- | A- | ususgug(Uhd)uuGfUf | 1931 | A-2862543 | VPusdCscadTudTauaud | 2286 | ACUUGUGUUUGUA | 2641 |
| 1549683.1 | 2862542 | AfuauaaauggaL96 | | | AcAfaacacaasgsu | | UAUAAAUGGU | |
| AD- | A- | usgsugu(Uhd)ugUfAf | 1932 | A-2862545 | VPusdAsccdAudTuaua | 2287 | CUUGUGUUUGUAU | 2642 |
| 1549684.1 | 2862544 | UfauaaaugguaL96 | | | dTaCfaaacacasasg | | AUAAAUGGUG | |
| AD- | A- | gsusguu(Uhd)guAfUf | 1933 | A-2862547 | VPusdCsacdCadTuuau | 2288 | UUGUGUUUGUAUA | 2643 |
| 1549685.1 | 2862546 | AfuaaauggugaL96 | | | dAuAfcaaacacsasa | | UAAAUGGUGA | |
| AD- | A- | usgsuuu(Ghd)uaUfAf | 1934 | A-2862549 | VPusdTscadCcdAuuua | 2289 | UGUGUUUGUAUAU | 2644 |
| 1549686.1 | 2862548 | UfaaauggugaaL96 | | | dTaUfacaaacascsa | | AAAUGGUGAG | |
| AD- | A- | usasucc(Chd)auCfUfC | 1935 | A-2862629 | VPusdTsaudTadAagug | 2290 | UUUAUCCCAUCUC | 2645 |
| 1549726.1 | 2862628 | facuuuaauaaL96 | | | dAgAfugggauasasa | | ACUUUAAUAA | |
| AD- | A- | asusccc(Ahd)ucUfCfA | 1936 | A-2862631 | VPusdTsuadTudAaagu | 2291 | UUAUCCCAUCUCA | 2646 |
| 1549727.1 | 2862630 | fcuuuaauaaaL96 | | | dGaGfaugggausasa | | CUUUAAUAAU | |
| AD- | A- | uscscca(Uhd)cuCfAfC | 1937 | A-2862633 | VPusdAsuudAudTaaag | 2292 | UAUCCCAUCUCAC | 2647 |
| 1549728.1 | 2862632 | fuuuaauaauaL96 | | | dTgAfgaugggasusa | | UUUAAUAAUA | |
| AD- | A- | cscscau(Chd)ucAfCfU | 1938 | A-2862635 | VPusdTsaudTadTuaaad | 2293 | AUCCCAUCUCACU | 2648 |
| 1549729.1 | 2862634 | fuuaauaauaaL96 | | | GuGfagaugggsasu | | UUAAUAAUAA | |
| AD- | A- | gscsaca(Uhd)auUfAfG | 1939 | A-2863761 | VPusdTsugdAadTgugc | 2294 | UAGCACAUAUUAG | 2649 |
| 1550292.1 | 2863760 | fcacauucaaaL96 | | | dTaAfuaugugcsusa | | CACAUUCAAG | |
| AD- | A- | asusauu(Ahd)gcAfCf | 1940 | A-2863869 | VPusdAsgcdCudTgaau | 2295 | ACAUAUUAGCACA | 2650 |
| 1550346.1 | 2863868 | AfuucaaggcuaL96 | | | dGuGfcuaauausgsu | | UUCAAGGCUC | |
| AD- | A- | usascag(Ghd)aaAfUfG | 1941 | A-2864093 | VPusdGsuudTadAaggc | 2296 | UUUACAGGAAAUG | 2651 |
| 1550458.1 | 2864092 | fccuuuaaacaL96 | | | dAuUfuccuguasasa | | CCUUUAAACA | |
| AD- | A- | ascsagg(Ahd)aaUfGfC | 1942 | A-2864095 | VPusdTsgudTudAaagg | 2297 | UUACAGGAAAUGC | 2652 |
| 1550459.1 | 2864094 | fcuuuaaacaaL96 | | | dCaUfuuccugusasa | | CUUUAAACAU | |
| AD- | A- | csusuua(Ahd)auGfUf | 1943 | A-2864471 | VPusdAsuadTudTggca | 2298 | UCCUUUAAAUGUU | 2653 |
| 1550647.1 | 2864470 | UfgccaaauauaL96 | | | dAcAfuuuaaagsgsa | | GCCAAAUAUA | |
| AD- | A- | ususuaa(Ahd)ugUfUf | 1944 | A-2864473 | VPusdTsaudAudTuggc | 2299 | CCUUUAAAUGUUG | 2654 |
| 1550648.1 | 2864472 | GfccaaauauaaL96 | | | dAaCfauuuaaasgsg | | CCAAAUAUAU | |
| AD- | A- | ususgcc(Ahd)aaUfAf | 1945 | A-2864489 | VPusdAsgadAudTcaua | 2300 | UGUUGCCAAAUAU | 2655 |
| 1550656.1 | 2864488 | UfaugaauucuaL96 | | | dTaUfuuggcaascsa | | AUGAAUUCUA | |
| AD- | A- | usgscca(Ahd)auAfUf | 1946 | A-2864491 | VPusdTsagdAadTucau | 2301 | GUUGCCAAAUAUA | 2656 |
| 1550657.1 | 2864490 | AfugaauucuaaL96 | | | dAuAfuuuggcasasc | | UGAAUUCUAG | |
| AD- | A- | gscscaa(Ahd)uaUfAfU | 1947 | A-2864493 | VPusdCsuadGadAuuca | 2302 | UUGCCAAAUAUAU | 2657 |
| 1550658.1 | 2864492 | fgaauucuagaL96 | | | dTaUfauuuggcsasa | | GAAUUCUAGG | |
| AD- | A- | cscsaaa(Uhd)auAfUfG | 1948 | A-2864495 | VPusdCscudAgdAauuc | 2303 | UGCCAAAUAUAUG | 2658 |
| 1550659.1 | 2864494 | faauucuaggaL96 | | | dAuAfuauuuggscsa | | AAUUCUAGGA | |
| AD- | A- | csasaau(Ahd)uaUfGfA | 1949 | A-2864497 | VPusdTsccdTadGaauud | 2304 | GCCAAAUAUAUGA | 2659 |
| 1550660.1 | 2864496 | fauucuaggaaL96 | | | CaUfauauuugsgsc | | AUUCUAGGAU | |
| AD- | A- | asasaua(Uhd)auGfAfA | 1950 | A-2864499 | VPusdAsucdCudAgaau | 2305 | CCAAAUAUAUGAA | 2660 |
| 1550661.1 | 2864498 | fuucuaggauaL96 | | | dTcAfuauauuusgsg | | UUCUAGGAUU | |
| AD- | A- | ususuca(Ghd)ggAfAf | 1951 | A-2864687 | VPusdTsuadAudAgauc | 2306 | UCUUUCAGGGAAG | 2661 |
| 1550755.1 | 2864686 | GfaucuauuaaaL96 | | | dTuCfccugaaasgsa | | AUCUAUUAAC | |
| AD- | A- | ususcag(Ghd)gaAfGf | 1952 | A-2864689 | VPusdGsuudAadTagau | 2307 | CUUUCAGGGAAGA | 2662 |
| 1550756.1 | 2864688 | AfucuauuaacaL96 | | | dCuUfcccugaasasg | | UCUAUUAACU | |
| AD- | A- | uscsagg(Ghd)aaGfAf | 1953 | A-2864691 | VPusdAsgudTadAuaga | 2308 | UUUCAGGGAAGAU | 2663 |
| 1550757.1 | 2864690 | UfcuauuaacuaL96 | | | dTcUfucccugasasa | | CUAUUAACUC | |
| AD- | A- | csasggg(Ahd)agAfUf | 1954 | A-2864693 | VPusdGsagdTudAauag | 2309 | UUCAGGGAAGAUC | 2664 |
| 1550758.1 | 2864692 | CfuauuaacucaL96 | | | dAuCfuucccugsasa | | UAUUAACUCC | |
| AD- | A- | uscsacu(Ahd)guAfGf | 1955 | A-2864915 | VPusdAsuudAudAcuuu | 2310 | AGUCACUAGUAGA | 2665 |
| 1550869.1 | 2864914 | AfaaguauaauaL96 | | | dCuAfcuagugascsu | | AAGUAUAAUU | |
| AD- | A- | csusagu(Ahd)gaAfAf | 1956 | A-2864919 | VPusdGsaadAudTauac | 2311 | CACUAGUAGAAAG | 2666 |
| 1550871.1 | 2864918 | GfuauaauuucaL96 | | | dTuUfcuacuagsusg | | UAUAAUUUCA | |
| AD- | A- | ususcaa(Ghd)acAfGfA | 1957 | A-2864951 | VPusdCsuadGadAuauu | 2312 | AUUUCAAGACAGA | 2667 |
| 1550887.1 | 2864950 | fauauucuagaL96 | | | dCuGfucuugaasasu | | AUAUUCUAGA | |
| AD- | A- | uscsaag(Ahd)caGfAfA | 1958 | A-2864953 | VPusdTscudAgdAauau | 2313 | UUUCAAGACAGAA | 2668 |
| 1550888.1 | 2864952 | fuauucuagaaL96 | | | dTcUfgucuugasasa | | UAUUCUAGAC | |
| AD- | A- | usasuuc(Uhd)agAfCf | 1959 | A-2865075 | VPusdCsugdCudAgcau | 2314 | AAUAUUCUAGACA | 2669 |
| 1550949.1 | 2865074 | AfugcuagcagaL96 | | | dGuCfuagaauasusu | | UGCUAGCAGU | |
| AD- | A- | usasgac(Ahd)ugCfUf | 1960 | A-2865085 | VPusdAsuadAadCugcu | 2315 | UCUAGACAUGCUA | 2670 |
| 1550954.1 | 2865084 | AfgcaguuuauaL96 | | | dAgCfaugucuasgsa | | GCAGUUUAUA | |
| AD- | A- | asgsaca(Uhd)gcUfAfG | 1961 | A-2865087 | VPusdTsaudAadAcugc | 2316 | CUAGACAUGCUAG | 2671 |
| 1550955.1 | 2865086 | fcaguuuauaaL96 | | | dTaGfcaugucusasg | | CAGUUUAUAU | |
| AD- | A- | gsascau(Ghd)cuAfGfC | 1962 | A-2865089 | VPusdAsuadTadAacug | 2317 | UAGACAUGCUAGC | 2672 |
| 1550956.1 | 2865088 | faguuuauauaL96 | | | dCuAfgcaugucsusa | | AGUUUAUAUG | |
| AD- | A- | ascsaug(Chd)uaGfCfA | 1963 | A-2865091 | VPusdCsaudAudAaacu | 2318 | AGACAUGCUAGCA | 2673 |
| 1550957.1 | 2865090 | fguuuauaugaL96 | | | dGcUfagcauguscsu | | GUUUAUAUGU | |
| AD- | A- | csasugc(Uhd)agCfAfG | 1964 | A-2865093 | VPusdAscadTadTaaacd | 2319 | GACAUGCUAGCAG | 2674 |
| 1550958.1 | 2865092 | fuuuauauguaL96 | | | TgCfuagcaugsusc | | UUUAUAUGUA | |
| AD- | A- | asusgcu(Ahd)gcAfGf | 1965 | A-2865095 | VPusdTsacdAudAuaaa | 2320 | ACAUGCUAGCAGU | 2675 |
| 1550959.1 | 2865094 | UfuuauauguaaL96 | | | dCuGfcuagcausgsu | | UUAUAUGUAU | |
| AD- | A- | usgscua(Ghd)caGfUf | 1966 | A-2865097 | VPusdAsuadCadTauaa | 2321 | CAUGCUAGCAGUU | 2676 |
| 1550960.1 | 2865096 | UfuauauguauaL96 | | | dAcUfgcuagcasusg | | UAUAUGUAUU | |
| AD- | A- | gscsuag(Chd)agUfUf | 1967 | A-2865099 | VPusdAsaudAcdAuaua | 2322 | AUGCUAGCAGUUU | 2677 |
| 1550961.1 | 2865098 | UfauauguauuaL96 | | | dAaCfugcuagcsasu | | AUAUGUAUUC | |
| AD- | A- | usasgca(Ghd)uuUfAf | 1968 | A-2865103 | VPusdTsgadAudAcaua | 2323 | GCUAGCAGUUUAU | 2678 |
| 1550963.1 | 2865102 | UfauguauucaaL96 | | | dTaAfacugcuasgsc | | AUGUAUUCAU | |
| AD- | A- | asgscag(Uhd)uuAfUf | 1969 | A-2865105 | VPusdAsugdAadTacau | 2324 | CUAGCAGUUUAUA | 2679 |
| 1550964.1 | 2865104 | AfuguauucauaL96 | | | dAuAfaacugcusasg | | UGUAUUCAUG | |
| AD- | A- | gscsagu(Uhd)uaUfAf | 1970 | A-2865107 | VPusdCsaudGadAuaca | 2325 | UAGCAGUUUAUAU | 2680 |
| 1550965.1 | 2865106 | UfguauucaugaL96 | | | dTaUfaaacugcsusa | | GUAUUCAUGA | |
| AD- | A- | asgsuaa(Uhd)guGfAf | 1971 | A-2865145 | VPusdCscadAudAuaua | 2326 | UGAGUAAUGUGAU | 2681 |
| 1550984.1 | 2865144 | UfauauauuggaL96 | | | dTcAfcauuacuscsa | | AUAUAUUGGG | |
| AD- | A- | gsasgga(Ahd)ugAfGf | 1972 | A-2865309 | VPusdCsuudAudAguca | 2327 | AGGAGGAAUGAGU | 2682 |
| 1551066.1 | 2865308 | UfgacuauaagaL96 | | | dCuCfauuccucscsu | | GACUAUAAGG | |
| AD- | A- | asgsgaa(Uhd)gaGfUf | 1973 | A-2865311 | VPusdCscudTadTagucd | 2328 | GGAGGAAUGAGUG | 2683 |
| 1551067.1 | 2865310 | GfacuauaaggaL96 | | | AcUfcauuccuscsc | | ACUAUAAGGA | |
| AD- | A- | gsgsaau(Ghd)agUfGf | 1974 | A-2865313 | VPusdTsccdTudAuagu | 2329 | GAGGAAUGAGUGA | 2684 |
| 1551068.1 | 2865312 | AfcuauaaggaaL96 | | | dCaCfucauuccsusc | | CUAUAAGGAU | |
| AD- | A- | gsasaug(Ahd)guGfAf | 1975 | A-2865315 | VPusdAsucdCudTauag | 2330 | AGGAAUGAGUGAC | 2685 |
| 1551069.1 | 2865314 | CfuauaaggauaL96 | | | dTcAfcucauucscsu | | UAUAAGGAUG | |
| AD- | A- | asasuga(Ghd)ugAfCf | 1976 | A-2865317 | VPusdCsaudCcdTuaua | 2331 | GGAAUGAGUGACU | 2686 |
| 1551070.1 | 2865316 | UfauaaggaugaL96 | | | dGuCfacucauuscsc | | AUAAGGAUGG | |
| AD- | A- | gsasgug(Ahd)cuAfUf | 1977 | A-2865323 | VPusdAsacdCadTccuu | 2332 | AUGAGUGACUAUA | 2687 |
| 1551073.1 | 2865322 | AfaggaugguuaL96 | | | dAuAfgucacucsasu | | AGGAUGGUUA | |
| AD- | A- | usgsacu(Ahd)uaAfGf | 1978 | A-2865329 | VPusdGsgudAadCcauc | 2333 | AGUGACUAUAAGG | 2688 |
| 1551076.1 | 2865328 | GfaugguuaccaL96 | | | dCuUfauagucascsu | | AUGGUUACCA | |
| AD- | A- | gsascua(Uhd)aaGfGfA | 1979 | A-2865331 | VPusdTsggdTadAccau | 2334 | GUGACUAUAAGGA | 2689 |
| 1551077.1 | 2865330 | fugguuaccaaL96 | | | dCcUfuauagucsasc | | UGGUUACCAU | |
| AD- | A- | ascsuau(Ahd)agGfAf | 1980 | A-2865333 | VPusdAsugdGudAacca | 2335 | UGACUAUAAGGAU | 2690 |
| 1551078.1 | 2865332 | UfgguuaccauaL96 | | | dTcCfuuauaguscsa | | GGUUACCAUA | |
| AD- | A- | gsasugg(Uhd)uaCfCf | 1981 | A-2865349 | VPusdAsagdTudTcuau | 2336 | AGGAUGGUUACCA | 2691 |
| 1551086.1 | 2865348 | AfuagaaacuuaL96 | | | dGgUfaaccaucscsu | | UAGAAACUUC | |
| AD- | A- | gsusuac(Chd)auAfGf | 1982 | A-2865357 | VPusdAsagdGadAguuu | 2337 | UGGUUACCAUAGA | 2692 |
| 1551090.1 | 2865356 | AfaacuuccuuaL96 | | | dCuAfugguaacscsa | | AACUUCCUUU | |
| AD- | A- | ususacc(Ahd)uaGfAf | 1983 | A-2865359 | VPusdAsaadGgdAaguu | 2338 | GGUUACCAUAGAA | 2693 |
| 1551091.1 | 2865358 | AfacuuccuuuaL96 | | | dTcUfaugguaascsc | | ACUUCCUUUU | |
| AD- | A- | usascua(Chd)agAfGfU | 1984 | A-2865505 | VPusdCsagdCudTagca | 2339 | ACUACUACAGAGU | 2694 |
| 1551164.1 | 2865504 | fgcuaagcugaL96 | | | dCuCfuguaguasgsu | | GCUAAGCUGC | |
| AD- | A- | asgsagu(Ghd)cuAfAf | 1985 | A-2865517 | VPusdCsacdAudGcagc | 2340 | ACAGAGUGCUAAG | 2695 |
| 1551170.1 | 2865516 | GfcugcaugugaL96 | | | dTuAfgcacucusgsu | | CUGCAUGUGU | |
| AD- | A- | gsasgug(Chd)uaAfGf | 1986 | A-2865519 | VPusdAscadCadTgcag | 2341 | CAGAGUGCUAAGC | 2696 |
| 1551171.1 | 2865518 | CfugcauguguaL96 | | | dCuUfagcacucsusg | | UGCAUGUGUC | |
| AD- | A- | usasagc(Uhd)gcAfUf | 1987 | A-2865531 | VPusdAsagdAudGacac | 2342 | GCUAAGCUGCAUG | 2697 |
| 1551177.1 | 2865530 | GfugucaucuuaL96 | | | dAuGfcagcuuasgsc | | UGUCAUCUUA | |
| AD- | A- | gscsugc(Ahd)ugUfGf | 1988 | A-2865537 | VPusdTsgudAadGauga | 2343 | AAGCUGCAUGUGU | 2698 |
| 1551180.1 | 2865536 | UfcaucuuacaaL96 | | | dCaCfaugcagcsusu | | CAUCUUACAC | |
| AD- | A- | csusgca(Uhd)guGfUf | 1989 | A-2865539 | VPusdGsugdTadAgaug | 2344 | AGCUGCAUGUGUC | 2699 |
| 1551181.1 | 2865538 | CfaucuuacacaL96 | | | dAcAfcaugcagscsu | | AUCUUACACU | |
| AD- | A- | usgscau(Ghd)ugUfCf | 1990 | A-2865541 | VPusdAsgudGudAagau | 2345 | GCUGCAUGUGUCA | 2700 |
| 1551182.1 | 2865540 | AfucuuacacuaL96 | | | dGaCfacaugcasgsc | | UCUUACACUA | |
| AD- | A- | usasgag(Ahd)gaAfAf | 1991 | A-2865679 | VPusdAsaadCudTaccad | 2346 | ACUAGAGAGAAAU | 2701 |
| 1551251.1 | 2865678 | UfgguaaguuuaL96 | | | TuUfcucucuasgsu | | GGUAAGUUUC | |
| AD- | A- | gsasgag(Ahd)aaUfGf | 1992 | A-2865683 | VPusdAsgadAadCuuac | 2347 | UAGAGAGAAAUGG | 2702 |
| 1551253.1 | 2865682 | GfuaaguuucuaL96 | | | dCaUfuucucucsusa | | UAAGUUUCUU | |
| AD- | A- | asgsaga(Ahd)auGfGf | 1993 | A-2865685 | VPusdAsagdAadAcuua | 2348 | AGAGAGAAAUGGU | 2703 |
| 1551254.1 | 2865684 | UfaaguuucuuaL96 | | | dCcAfuuucucuscsu | | AAGUUUCUUG | |
| AD- | A- | gsasgaa(Ahd)ugGfUf | 1994 | A-2865687 | VPusdCsaadGadAacuu | 2349 | GAGAGAAAUGGUA | 2704 |
| 1551255.1 | 2865686 | AfaguuucuugaL96 | | | dAcCfauuucucsusc | | AGUUUCUUGU | |
| AD- | A- | asgsaaa(Uhd)ggUfAf | 1995 | A-2865689 | VPusdAscadAgdAaacu | 2350 | AGAGAAAUGGUAA | 2705 |
| 1551256.1 | 2865688 | AfguuucuuguaL96 | | | dTaCfcauuucuscsu | | GUUUCUUGUU | |
| AD- | A- | gsasaau(Ghd)guAfAf | 1996 | A-2865691 | VPusdAsacdAadGaaac | 2351 | GAGAAAUGGUAAG | 2706 |
| 1551257.1 | 2865690 | GfuuucuuguuaL96 | | | dTuAfccauuucsusc | | UUUCUUGUUU | |
| AD- | A- | asasaug(Ghd)uaAfGf | 1997 | A-2865693 | VPusdAsaadCadAgaaa | 2352 | AGAAAUGGUAAGU | 2707 |
| 1551258.1 | 2865692 | UfuucuuguuuaL96 | | | dCuUfaccauuuscsu | | UUCUUGUUUU | |
| AD- | A- | usasuug(Ahd)acAfGf | 1998 | A-2865869 | VPusdCsugdAadAuaua | 2353 | GUUAUUGAACAGU | 2708 |
| 1551346.1 | 2865868 | UfauauuucagaL96 | | | dCuGfuucaauasasc | | AUAUUUCAGG | |
| AD- | A- | asusuga(Ahd)caGfUf | 1999 | A-2865871 | VPusdCscudGadAauau | 2354 | UUAUUGAACAGUA | 2709 |
| 1551347.1 | 2865870 | AfuauuucaggaL96 | | | dAcUfguucaausasa | | UAUUUCAGGA | |
| AD- | A- | csasgua(Uhd)auUfUfC | 2000 | A-2865883 | VPusdAsacdCudTccug | 2355 | AACAGUAUAUUUC | 2710 |
| 1551353.1 | 2865882 | faggaagguuaL96 | | | dAaAfuauacugsusu | | AGGAAGGUUA | |
| AD- | A- | csusacc(Uhd)aaAfGfC | 2001 | A-2865961 | VPusdAsaadTadTgcug | 2356 | AUCUACCUAAAGC | 2711 |
| 1551392.1 | 2865960 | fagcauauuuaL96 | | | dCuUfuagguagsasu | | AGCAUAUUUU | |
| AD- | A- | asasguu(Ghd)ugAfCf | 2002 | A-2866309 | VPusdTsaadAudTcaug | 2357 | GAAAGUUGUGACC | 2712 |
| 1551566.1 | 2866308 | CfaugaauuuaaL96 | | | dGuCfacaacuususc | | AUGAAUUUAA | |
| AD- | A- | asusuua(Uhd)guGfGf | 2003 | A-2866353 | VPusdGsaadTudTguau | 2358 | GGAUUUAUGUGGA | 2713 |
| 1551588.1 | 2866352 | AfuacaaauucaL96 | | | dCcAfcauaaauscsc | | UACAAAUUCU | |
| AD- | A- | ususuau(Ghd)ugGfAf | 2004 | A-2866355 | VPusdAsgadAudTugua | 2359 | GAUUUAUGUGGAU | 2714 |
| 1551589.1 | 2866354 | UfacaaauucuaL96 | | | dTcCfacauaaasusc | | ACAAAUUCUC | |
| AD- | A- | ususaug(Uhd)ggAfUf | 2005 | A-2866357 | VPusdGsagdAadTuugu | 2360 | AUUUAUGUGGAUA | 2715 |
| 1551590.1 | 2866356 | AfcaaauucucaL96 | | | dAuCfcacauaasasu | | CAAAUUCUCC | |
| AD- | A- | asusgug(Ghd)auAfCf | 2006 | A-2866361 | VPusdAsggdAgdAauuu | 2361 | UUAUGUGGAUACA | 2716 |
| 1551592.1 | 2866360 | AfaauucuccuaL96 | | | dGuAfuccacausasa | | AAUUCUCCUU | |
| AD- | A- | gsgsaua(Chd)aaAfUfU | 2007 | A-2866469 | VPusdTsuadAadGgaga | 2362 | GUGGAUACAAAUU | 2717 |
| 1551646.1 | 2866468 | fcuccuuuaaaL96 | | | dAuUfuguauccsasc | | CUCCUUUAAA | |
| AD- | A- | asusaca(Ahd)auUfCfU | 2008 | A-2866473 | VPusdCsuudTadAagga | 2363 | GGAUACAAAUUCU | 2718 |
| 1551648.1 | 2866472 | fccuuuaaagaL96 | | | dGaAfuuuguauscsc | | CCUUUAAAGU | |
| AD- | A- | usascaa(Ahd)uuCfUfC | 2009 | A-2866475 | VPusdAscudTudAaagg | 2364 | GAUACAAAUUCUC | 2719 |
| 1551649.1 | 2866474 | fcuuuaaaguaL96 | | | dAgAfauuuguasusc | | CUUUAAAGUG | |
| AD- | A- | ascsaaa(Uhd)ucUfCfC | 2010 | A-2866477 | VPusdCsacdTudTaaagd | 2365 | AUACAAAUUCUCC | 2720 |
| 1551650.1 | 2866476 | fuuuaaagugaL96 | | | GaGfaauuugusasu | | UUUAAAGUGU | |
| AD- | A- | csasaau(Uhd)cuCfCfU | 2011 | A-2866479 | VPusdAscadCudTuaaa | 2366 | UACAAAUUCUCCU | 2721 |
| 1551651.1 | 2866478 | fuuaaaguguaL96 | | | dGgAfgaauuugsusa | | UUAAAGUGUU | |
| AD- | A- | asasuuc(Uhd)ccUfUfU | 2012 | A-2866483 | VPusdAsaadCadCuuua | 2367 | CAAAUUCUCCUUU | 2722 |
| 1551653.1 | 2866482 | faaaguguuuaL96 | | | dAaGfgagaauususg | | AAAGUGUUUC | |
| AD- | A- | ususcuc(Chd)uuUfAf | 2013 | A-2866487 | VPusdAsgadAadCacuu | 2368 | AAUUCUCCUUUAA | 2723 |
| 1551655.1 | 2866486 | AfaguguuucuaL96 | | | dTaAfaggagaasusu | | AGUGUUUCUU | |
| AD- | A- | uscsucc(Uhd)uuAfAf | 2014 | A-2866489 | VPusdAsagdAadAcacu | 2369 | AUUCUCCUUUAAA | 2724 |
| 1551656.1 | 2866488 | AfguguuucuuaL96 | | | dTuAfaaggagasasu | | GUGUUUCUUC | |
| AD- | A- | csusccu(Uhd)uaAfAf | 2015 | A-2866491 | VPusdGsaadGadAacac | 2370 | UUCUCCUUUAAAG | 2725 |
| 1551657.1 | 2866490 | GfuguuucuucaL96 | | | dTuUfaaaggagsasa | | UGUUUCUUCC | |
| AD- | A- | uscscuu(Uhd)aaAfGf | 2016 | A-2866493 | VPusdGsgadAgdAaaca | 2371 | UCUCCUUUAAAGU | 2726 |
| 1551658.1 | 2866492 | UfguuucuuccaL96 | | | dCuUfuaaaggasgsa | | GUUUCUUCCC | |
| AD- | A- | cscsuuu(Ahd)aaGfUf | 2017 | A-2866495 | VPusdGsggdAadGaaac | 2372 | CUCCUUUAAAGUG | 2727 |
| 1551659.1 | 2866494 | GfuuucuucccaL96 | | | dAcUfuuaaaggsasg | | UUUCUUCCCU | |
| AD- | A- | ususuaa(Ahd)guGfUf | 2018 | A-2866499 | VPusdAsagdGgdAagaa | 2373 | CCUUUAAAGUGUU | 2728 |
| 1551661.1 | 2866498 | UfucuucccuuaL96 | | | dAcAfcuuuaaasgsg | | UCUUCCCUUA | |
| AD- | A- | asasgug(Uhd)uuCfUf | 2019 | A-2866507 | VPusdTsaudTadAggga | 2374 | UAAAGUGUUUCUU | 2729 |
| 1551665.1 | 2866506 | UfcccuuaauaaL96 | | | dAgAfaacacuususa | | CCCUUAAUAU | |
| AD- | A- | asgsugu(Uhd)ucUfUf | 2020 | A-2866509 | VPusdAsuadTudAaggg | 2375 | AAAGUGUUUCUUC | 2730 |
| 1551666.1 | 2866508 | CfccuuaauauaL96 | | | dAaGfaaacacususu | | CCUUAAUAUU | |
| AD- | A- | gsusguu(Uhd)cuUfCf | 2021 | A-2866511 | VPusdAsaudAudTaagg | 2376 | AAGUGUUUCUUCC | 2731 |
| 1551667.1 | 2866510 | CfcuuaauauuaL96 | | | dGaAfgaaacacsusu | | CUUAAUAUUU | |
| AD- | A- | gsusuuc(Uhd)ucCfCf | 2022 | A-2866513 | VPusdTsaadAudAuuaa | 2377 | GUGUUUCUUCCCU | 2732 |
| 1551668.1 | 2866512 | UfuaauauuuaaL96 | | | dGgGfaagaaacsasc | | UAAUAUUUAU | |
| AD- | A- | ususcuu(Chd)ccUfUf | 2023 | A-2866517 | VPusdGsaudAadAuauu | 2378 | GUUUCUUCCCUUA | 2733 |
| 1551670.1 | 2866516 | AfauauuuaucaL96 | | | dAaGfggaagaasasc | | AUAUUUAUCU | |
| AD- | A- | csusucc(Chd)uuAfAf | 2024 | A-2866521 | VPusdCsagdAudAaaua | 2379 | UUCUUCCCUUAAU | 2734 |
| 1551672.1 | 2866520 | UfauuuaucugaL96 | | | dTuAfagggaagsasa | | AUUUAUCUGA | |
| AD- | A- | csusuac(Ahd)uuCfUfC | 2025 | A-2867281 | VPusdAsuadAcdTuggg | 2380 | GACUUACAUUCUC | 2735 |
| 1552052.1 | 2867280 | fccaaguuauaL96 | | | dAgAfauguaagsusc | | CCAAGUUAUU | |
| AD- | A- | ususaca(Uhd)ucUfCfC | 2026 | A-2867283 | VPusdAsaudAadCuugg | 2381 | ACUUACAUUCUCC | 2736 |
| 1552053.1 | 2867282 | fcaaguuauuaL96 | | | dGaGfaauguaasgsu | | CAAGUUAUUC | |
| AD- | A- | usascau(Uhd)cuCfCfC | 2027 | A-2867285 | VPusdGsaadTadAcuug | 2382 | CUUACAUUCUCCC | 2737 |
| 1552054.1 | 2867284 | faaguuauucaL96 | | | dGgAfgaauguasasg | | AAGUUAUUCA | |
| AD- | A- | ascsauu(Chd)ucCfCfA | 2028 | A-2867287 | VPusdTsgadAudAacuu | 2383 | UUACAUUCUCCCA | 2738 |
| 1552055.1 | 2867286 | faguuauucaaL96 | | | dGgGfagaaugusasa | | AGUUAUUCAG | |
| AD- | A- | csasuuc(Uhd)ccCfAfA | 2029 | A-2867289 | VPusdCsugdAadTaacu | 2384 | UACAUUCUCCCAA | 2739 |
| 1552056.1 | 2867288 | fguuauucagaL96 | | | dTgGfgagaaugsusa | | GUUAUUCAGC | |
| AD- | A- | asusucu(Chd)ccAfAfG | 2030 | A-2867291 | VPusdGscudGadAuaac | 2385 | ACAUUCUCCCAAG | 2740 |
| 1552057.1 | 2867290 | fuuauucagcaL96 | | | dTuGfggagaausgsu | | UUAUUCAGCC | |
| AD- | A- | asasguu(Ahd)uuCfAf | 2031 | A-2867307 | VPusdCsaudAudGaggc | 2386 | CCAAGUUAUUCAG | 2741 |
| 1552065.1 | 2867306 | GfccucauaugaL96 | | | dTgAfauaacuusgsg | | CCUCAUAUGA | |
| AD- | A- | asgsuua(Uhd)ucAfGf | 2032 | A-2867309 | VPusdTscadTadTgaggd | 2387 | CAAGUUAUUCAGC | 2742 |
| 1552066.1 | 2867308 | CfcucauaugaaL96 | | | CuGfaauaacususg | | CUCAUAUGAC | |
| AD- | A- | gsusuau(Uhd)caGfCfC | 2033 | A-2867311 | VPusdGsucdAudAugag | 2388 | AAGUUAUUCAGCC | 2743 |
| 1552067.1 | 2867310 | fucauaugacaL96 | | | dGcUfgaauaacsusu | | UCAUAUGACU | |
| AD- | A- | ascsagu(Uhd)caGfAfG | 2034 | A-2867493 | VPusdCsaadAgdTgcac | 2389 | AAACAGUUCAGAG | 2744 |
| 1552158.1 | 2867492 | fugcacuuugaL96 | | | dTcUfgaacugususu | | UGCACUUUGG | |
| AD- | A- | csasguu(Chd)agAfGf | 2035 | A-2867495 | VPusdCscadAadGugca | 2390 | AACAGUUCAGAGU | 2745 |
| 1552159.1 | 2867494 | UfgcacuuuggaL96 | | | dCuCfugaacugsusu | | GCACUUUGGC | |
| AD- | A- | gsusuca(Ghd)agUfGf | 2036 | A-2867499 | VPusdTsgcdCadAagug | 2391 | CAGUUCAGAGUGC | 2746 |
| 1552161.1 | 2867498 | CfacuuuggcaaL96 | | | dCaCfucugaacsusg | | ACUUUGGCAC | |
| AD- | A- | usgscac(Uhd)uuGfGf | 2037 | A-2867515 | VPusdCsaadTudGugug | 2392 | AGUGCACUUUGGC | 2747 |
| 1552169.1 | 2867514 | CfacacaauugaL96 | | | dCcAfaagugcascsu | | ACACAAUUGG | |
| AD- | A- | asascag(Ahd)acAfAfU | 2038 | A-2867559 | VPusdAscadCadTuaga | 2393 | GGAACAGAACAAU | 2748 |
| 1552191.1 | 2867558 | fcuaauguguaL96 | | | dTuGfuucuguuscsc | | CUAAUGUGUG | |
| AD- | A- | ascsaga(Ahd)caAfUfC | 2039 | A-2867561 | VPusdCsacdAcdAuuag | 2394 | GAACAGAACAAUC | 2749 |
| 1552192.1 | 2867560 | fuaaugugugaL96 | | | dAuUfguucugususc | | UAAUGUGUGG | |
| AD- | A- | csasgaa(Chd)aaUfCfU | 2040 | A-2867563 | VPusdCscadCadCauua | 2395 | AACAGAACAAUCU | 2750 |
| 1552193.1 | 2867562 | faauguguggaL96 | | | dGaUfuguucugsusu | | AAUGUGUGGU | |
| AD- | A- | asgsaac(Ahd)auCfUfA | 2041 | A-2867665 | VPusdAsccdAcdAcauu | 2396 | ACAGAACAAUCUA | 2751 |
| 1552244.1 | 2867664 | faugugugguaL96 | | | dAgAfuuguucusgsu | | AUGUGUGGUU | |
| AD- | A- | ascsaau(Chd)uaAfUfG | 2042 | A-2867671 | VPusdCsaadAcdCacacd | 2397 | GAACAAUCUAAUG | 2752 |
| 1552247.1 | 2867670 | fugugguuugaL96 | | | AuUfagauugususc | | UGUGGUUUGG | |
| AD- | A- | csasauc(Uhd)aaUfGfU | 2043 | A-2867673 | VPusdCscadAadCcacad | 2398 | AACAAUCUAAUGU | 2753 |
| 1552248.1 | 2867672 | fgugguuuggaL96 | | | CaUfuagauugsusu | | GUGGUUUGGU | |
| AD- | A- | asasucu(Ahd)auGfUf | 2044 | A-2867675 | VPusdAsccdAadAccac | 2399 | ACAAUCUAAUGUG | 2754 |
| 1552249.1 | 2867674 | GfugguuugguaL96 | | | dAcAfuuagauusgsu | | UGGUUUGGUA | |
| AD- | A- | asuscua(Ahd)ugUfGf | 2045 | A-2867677 | VPusdTsacdCadAaccad | 2400 | CAAUCUAAUGUGU | 2755 |
| 1552250.1 | 2867676 | UfgguuugguaaL96 | | | CaCfauuagaususg | | GGUUUGGUAU | |
| AD- | A- | uscsuaa(Uhd)guGfUf | 2046 | A-2867679 | VPusdAsuadCcdAaacc | 2401 | AAUCUAAUGUGUG | 2756 |
| 1552251.1 | 2867678 | GfguuugguauaL96 | | | dAcAfcauuagasusu | | GUUUGGUAUU | |
| AD- | A- | usasaug(Uhd)guGfGf | 2047 | A-2867683 | VPusdGsaadTadCcaaad | 2402 | UCUAAUGUGUGGU | 2757 |
| 1552253.1 | 2867682 | UfuugguauucaL96 | | | CcAfcacauuasgsa | | UUGGUAUUCC | |
| AD- | A- | asasugu(Ghd)ugGfUf | 2048 | A-2867685 | VPusdGsgadAudAccaa | 2403 | CUAAUGUGUGGUU | 2758 |
| 1552254.1 | 2867684 | UfugguauuccaL96 | | | dAcCfacacauusasg | | UGGUAUUCCA | |
| AD- | A- | asusgug(Uhd)ggUfUf | 2049 | A-2867687 | VPusdTsggdAadTaccad | 2404 | UAAUGUGUGGUUU | 2759 |
| 1552255.1 | 2867686 | UfgguauuccaaL96 | | | AaCfcacacaususa | | GGUAUUCCAA | |
| AD- | A- | gsusgug(Ghd)uuUfGf | 2050 | A-2867691 | VPusdCsuudGgdAauac | 2405 | AUGUGUGGUUUGG | 2760 |
| 1552257.1 | 2867690 | GfuauuccaagaL96 | | | dCaAfaccacacsasu | | UAUUCCAAGU | |
| AD- | A- | gsusgug(Ghd)UfgUfA | 2051 | A-2901262 | VPusUfsgadAu(Tgn)cc | 2406 | CAGUGUGGUGUAA | 2761 |
| 1571164.1 | 1142146 | fAfaggaauucaaL96 | | | uuuaCfaCfcacacsusg | | AGGAAUUCAU | |
| AD- | A- | gsusggu(Ghd)UfaAfA | 2052 | A-2901263 | VPusAfsaudGa(Agn)uu | 2407 | GUGUGGUGUAAAG | 2762 |
| 1571165.1 | 1142150 | fGfgaauucauuaL96 | | | ccuuUfaCfaccacsasc | | GAAUUCAUUA | |
| AD- | A- | asgscca(Uhd)GfgAfUf | 2053 | A-2901264 | VPusUfscadTg(Agn)au | 2408 | UUAGCCAUGGAUG | 2763 |
| 1571166.1 | 1142190 | GfuauucaugaaL96 | | | acauCfcAfuggcusasa | | UAUUCAUGAA | |
| AD- | A- | usgsgau(Ghd)UfaUfUf | 2054 | A-2901265 | VPusUfsccdTu(Tgn)ca | 2409 | CAUGGAUGUAUUC | 2764 |
| 1571167.1 | 1142200 | CfaugaaaggaaL96 | | | ugaaUfaCfauccasusg | | AUGAAAGGAC | |
| AD- | A- | asusuca(Uhd)GfaAfAf | 2055 | A-2901266 | VPusUfsugdAa(Agn)gu | 2410 | GUAUUCAUGAAAG | 2765 |
| 1571168.1 | 1142214 | GfgacuuucaaaL96 | | | ccuuUfcAfugaausasc | | GACUUUCAAA | |
| AD- | A- | asusgaa(Ahd)GfgAfCf | 2056 | A-2901267 | VPusGfsccdTu(Tgn)ga | 2411 | UCAUGAAAGGACU | 2766 |
| 1571169.1 | 1142222 | UfuucaaaggcaL96 | | | aaguCfcUfuucausgsa | | UUCAAAGGCC | |
| AD- | A- | usgsaaa(Ghd)GfaCfUf | 2057 | A-2901268 | VPusGfsgcdCu(Tgn)ug | 2412 | CAUGAAAGGACUU | 2767 |
| 1571170.1 | 1142224 | UfucaaaggccaL96 | | | aaagUfcCfuuucasusg | | UCAAAGGCCA | |
| AD- | A- | gsgsgug(Uhd)UfcUfCf | 2058 | A-2901269 | VPusAfsgcdCu(Agn)ca | 2413 | GAGGGUGUUCUCU | 2768 |
| 1571171.1 | 1142402 | UfauguaggcuaL96 | | | uagaGfaAfcacccsusc | | AUGUAGGCUC | |
| AD- | A- | gsgscug(Ahd)GfaAfGf | 2059 | A-2901270 | VPusGfscudCu(Tgn)ug | 2414 | GUGGCUGAGAAGA | 2769 |
| 1571172.1 | 1142522 | AfccaaagagcaL96 | | | gucuUfcUfcagccsasc | | CCAAAGAGCA | |
| AD- | A- | gsasaga(Chd)CfaAfAf | 2060 | A-2901271 | VPusUfscadCu(Tgn)gc | 2415 | GAGAAGACCAAAG | 2770 |
| 1571173.1 | 1142534 | GfagcaagugaaL96 | | | ucuuUfgGfucuucsusc | | AGCAAGUGAC | |
| AD- | A- | cscsuga(Chd)AfaUfGf | 2061 | A-2901272 | VPusUfscadTa(Agn)gc | 2416 | AUCCUGACAAUGA | 2771 |
| 1571174.1 | 1142868 | AfggcuuaugaaL96 | | | cucaUfuGfucaggsasu | | GGCUUAUGAA | |
| AD- | A- | csasaug(Ahd)GfgCfUf | 2062 | A-2901273 | VPusGfscadTu(Tgn)ca | 2417 | GACAAUGAGGCUU | 2772 |
| 1571175.1 | 1142878 | UfaugaaaugcaL96 | | | uaagCfcUfcauugsusc | | AUGAAAUGCC | |
| AD- | A- | asasuga(Ghd)GfcUfUf | 2063 | A-2901274 | VPusGfsgcdAu(Tgn)uc | 2418 | ACAAUGAGGCUUA | 2773 |
| 1571176.1 | 1142880 | AfugaaaugccaL96 | | | auaaGfcCfucauusgsu | | UGAAAUGCCU | |
| AD- | A- | usgsaaa(Uhd)GfcCfUf | 2064 | A-2901275 | VPusCfsuudCc(Tgn)ca | 2419 | UAUGAAAUGCCUU | 2774 |
| 1571177.1 | 1142902 | UfcugaggaagaL96 | | | gaagGfcAfuuucasusa | | CUGAGGAAGG | |
| AD- | A- | asasggg(Uhd)AfuCfAf | 2065 | A-2901276 | VPusUfsucdGu(Agn)gu | 2420 | GGAAGGGUAUCAA | 2775 |
| 1571178.1 | 1142936 | AfgacuacgaaaL96 | | | cuugAfuAfcccuuscsc | | GACUACGAAC | |
| AD- | A- | asgsggu(Ahd)UfcAfAf | 2066 | A-2901277 | VPusGfsuudCg(Tgn)ag | 2421 | GAAGGGUAUCAAG | 2776 |
| 1571179.1 | 1142938 | GfacuacgaacaL96 | | | ucuuGfaUfacccususc | | ACUACGAACC | |
| AD- | A- | ascscug(Ahd)AfgCfCf | 2067 | A-2901278 | VPusAfsuadTu(Tgn)cu | 2422 | GAACCUGAAGCCU | 2777 |
| 1571180.1 | 1142974 | UfaagaaauauaL96 | | | uaggCfuUfcaggususc | | AAGAAAUAUC | |
| AD- | A- | csusgaa(Ghd)CfcUfAf | 2068 | A-2901279 | VPusAfsgadTa(Tgn)uu | 2423 | ACCUGAAGCCUAA | 2778 |
| 1571181.1 | 1142978 | AfgaaauaucuaL96 | | | cuuaGfgCfuucagsgsu | | GAAAUAUCUU | |
| AD- | A- | gsasagc(Chd)UfaAfGf | 2069 | A-2901280 | VPusAfsaadGa(Tgn)au | 2424 | CUGAAGCCUAAGA | 2779 |
| 1571182.1 | 1142982 | AfaauaucuuuaL96 | | | uucuUfaGfgcuucsasg | | AAUAUCUUUG | |
| AD- | A- | csusaag(Ahd)AfaUfAf | 2070 | A-2901281 | VPusGfsgadGc(Agn)aa | 2425 | GCCUAAGAAAUAU | 2780 |
| 1571183.1 | 1142992 | UfcuuugcuccaL96 | | | gauaUfuUfcuuagsgsc | | CUUUGCUCCC | |
| AD- | A- | asusauc(Uhd)UfuGfCf | 2071 | A-2901282 | VPusGfsaadAc(Tgn)gg | 2426 | AAAUAUCUUUGCU | 2781 |
| 1571184.1 | 1143006 | UfcccaguuucaL96 | | | gagcAfaAfgauaususu | | CCCAGUUUCU | |
| AD- | A- | ususgcu(Chd)CfcAfGf | 2072 | A-2901283 | VPusUfscudCa(Agn)ga | 2427 | CUUUGCUCCCAGU | 2782 |
| 1571185.1 | 1143018 | UfuucuugagaaL96 | | | aacuGfgGfagcaasasg | | UUCUUGAGAU | |
| AD- | A- | usgscuc(Chd)CfaGfUf | 2073 | A-2901284 | VPusAfsucdTc(Agn)ag | 2428 | UUUGCUCCCAGUU | 2783 |
| 1571186.1 | 1143020 | UfucuugagauaL96 | | | aaacUfgGfgagcasasa | | UCUUGAGAUC | |
| AD- | A- | csusgua(Chd)AfaGfUf | 2074 | A-2901285 | VPusGfsgadAc(Tgn)ga | 2429 | UCCUGUACAAGUG | 2784 |
| 1571187.1 | 1143100 | GfcucaguuccaL96 | | | gcacUfuGfuacagsgsa | | CUCAGUUCCA | |
| AD- | A- | gsusaca(Ahd)GfuGfCf | 2075 | A-2901286 | VPusUfsugdGa(Agn)cu | 2430 | CUGUACAAGUGCU | 2785 |
| 1571188.1 | 1143104 | UfcaguuccaaaL96 | | | gagcAfcUfuguacsasg | | CAGUUCCAAU | |
| AD- | A- | cscsagu(Chd)AfuGfAf | 2076 | A-2901287 | VPusUfsugdAg(Agn)aa | 2431 | GCCCAGUCAUGAC | 2786 |
| 1571189.1 | 1143154 | CfauuucucaaaL96 | | | ugucAfuGfacuggsgsc | | AUUUCUCAAA | |
| AD- | A- | uscsuuc(Chd)AfuCfAf | 2077 | A-2901288 | VPusCfsaadTc(Agn)cu | 2432 | AGUCUUCCAUCAG | 2787 |
| 1571190.1 | 1143240 | GfcagugauugaL96 | | | gcugAfuGfgaagascsu | | CAGUGAUUGA | |
| AD- | A- | ususcca(Uhd)CfaGfCf | 2078 | A-2901289 | VPusUfsucdAa(Tgn)ca | 2433 | UCUUCCAUCAGCA | 2788 |
| 1571191.1 | 1143244 | AfgugauugaaaL96 | | | cugcUfgAfuggaasgsa | | GUGAUUGAAG | |
| AD- | A- | cscsauc(Ahd)GfcAfGf | 2079 | A-2901290 | VPusAfscudTc(Agn)au | 2434 | UUCCAUCAGCAGU | 2789 |
| 1571192.1 | 1143248 | UfgauugaaguaL96 | | | cacuGfcUfgauggsasa | | GAUUGAAGUA | |
| AD- | A- | asuscag(Chd)AfgUfGf | 2080 | A-2901291 | VPusAfsuadCu(Tgn)ca | 2435 | CCAUCAGCAGUGA | 2790 |
| 1571193.1 | 1143252 | AfuugaaguauaL96 | | | aucaCfuGfcugausgsg | | UUGAAGUAUC | |
| AD- | A- | gscsagu(Ghd)AfuUfGf | 2081 | A-2901292 | VPusAfscadGa(Tgn)ac | 2436 | CAGCAGUGAUUGA | 2791 |
| 1571194.1 | 1143260 | AfaguaucuguaL96 | | | uucaAfuCfacugcsusg | | AGUAUCUGUA | |
| AD- | A- | csusucc(Chd)UfuUfCf | 2082 | A-2901293 | VPusUfscadCu(Tgn)ca | 2437 | UGCUUCCCUUUCA | 2792 |
| 1571195.1 | 1143310 | AfcugaagugaaL96 | | | gugaAfaGfggaagscsa | | CUGAAGUGAA | |
| AD- | A- | ususcac(Uhd)GfaAfGf | 2083 | A-2901294 | VPusCfsaudGu(Agn)uu | 2438 | CUUUCACUGAAGU | 2793 |
| 1571196.1 | 1143324 | UfgaauacaugaL96 | | | cacuUfcAfgugaasasg | | GAAUACAUGG | |
| AD- | A- | uscsacu(Ghd)AfaGfUf | 2084 | A-2901295 | VPusCfscadTg(Tgn)au | 2439 | UUUCACUGAAGUG | 2794 |
| 1571197.1 | 1143326 | GfaauacauggaL96 | | | ucacUfuCfagugasasa | | AAUACAUGGU | |
| AD- | A- | ascsuga(Ahd)GfuGfAf | 2085 | A-2901296 | VPusUfsacdCa(Tgn)gu | 2440 | UCACUGAAGUGAA | 2795 |
| 1571198.1 | 1143330 | AfuacaugguaaL96 | | | auucAfcUfucagusgsa | | UACAUGGUAG | |
| AD- | A- | csusacc(Ahd)CfuUfAf | 2086 | A-2901297 | VPusGfsaudTu(Agn)ga | 2441 | GACUACCACUUAU | 2796 |
| 1571199.1 | 1143496 | UfuucuaaaucaL96 | | | aauaAfgUfgguagsusc | | UUCUAAAUCC | |
| AD- | A- | usascca(Chd)UfuAfUf | 2087 | A-2901298 | VPusGfsgadTu(Tgn)ag | 2442 | ACUACCACUUAUU | 2797 |
| 1571200.1 | 1143498 | UfucuaaauccaL96 | | | aaauAfaGfugguasgsu | | UCUAAAUCCU | |
| AD- | A- | cscsacu(Uhd)AfuUfUf | 2088 | A-2901299 | VPusGfsagdGa(Tgn)uu | 2443 | UACCACUUAUUUC | 2798 |
| 1571201.1 | 1143502 | CfuaaauccucaL96 | | | agaaAfuAfaguggsusa | | UAAAUCCUCA | |
| AD- | A- | asgsuug(Uhd)UfaGfUf | 2089 | A-2901300 | VPusAfsuadGc(Agn)aa | 2444 | GAAGUUGUUAGUG | 2799 |
| 1571202.1 | 1143558 | GfauuugcuauaL96 | | | ucacUfaAfcaacususc | | AUUUGCUAUC | |
| AD- | A- | asusacu(Ghd)UfcUfAf | 2090 | A-2901301 | VPusUfscadTu(Agn)uu | 2445 | UGAUACUGUCUAA | 2800 |
| 1571203.1 | 1143638 | AfgaauaaugaaL96 | | | cuuaGfaCfaguauscsa | | GAAUAAUGAC | |
| AD- | A- | asusaug(Uhd)GfaGfCf | 2091 | A-2901302 | VPusAfsuadGu(Tgn)uc | 2446 | AAAUAUGUGAGCA | 2801 |
| 1571204.1 | 1143700 | AfugaaacuauaL96 | | | augcUfcAfcauaususu | | UGAAACUAUG | |
| AD- | A- | usasugu(Ghd)AfgCfAf | 2092 | A-2901303 | VPusCfsaudAg(Tgn)uu | 2447 | AAUAUGUGAGCAU | 2802 |
| 1571205.1 | 1143702 | UfgaaacuaugaL96 | | | caugCfuCfacauasusu | | GAAACUAUGC | |
| AD- | A- | usgsuga(Ghd)CfaUfGf | 2093 | A-2901304 | VPusUfsgcdAu(Agn)gu | 2448 | UAUGUGAGCAUGA | 2803 |
| 1571206.1 | 1143706 | AfaacuaugcaaL96 | | | uucaUfgCfucacasusa | | AACUAUGCAC | |
| AD- | A- | asascua(Uhd)GfcAfCf | 2094 | A-2901305 | VPusGfsuadTu(Tgn)au | 2449 | GAAACUAUGCACC | 2804 |
| 1571207.1 | 1143728 | CfuauaaauacaL96 | | | agguGfcAfuaguususc | | UAUAAAUACU | |
| AD- | A- | csusaug(Chd)AfcCfUf | 2095 | A-2901306 | VPusUfsagdTa(Tgn)uu | 2450 | AACUAUGCACCUA | 2805 |
| 1571208.1 | 1143732 | AfuaaauacuaaL96 | | | auagGfuGfcauagsusu | | UAAAUACUAA | |
| AD- | A- | usgsuuu(Ghd)UfaUfA | 2096 | A-2901307 | VPusUfscadCc(Agn)uu | 2451 | UGUGUUUGUAUAU | 2806 |
| 1571209.1 | 1143818 | fUfaaauggugaaL96 | | | uauaUfaCfaaacascsa | | AAAUGGUGAG | |
| AD- | A- | cscscau(Chd)UfcAfCf | 2097 | A-2901308 | VPusUfsaudTa(Tgn)ua | 2452 | AUCCCAUCUCACU | 2807 |
| 1571210.1 | 1143904 | UfuuaauaauaaL96 | | | aaguGfaGfaugggsasu | | UUAAUAAUAA | |
| AD- | A- | asusauu(Ahd)GfcAfCf | 2098 | A-2901309 | VPusAfsgcdCu(Tgn)ga | 2453 | ACAUAUUAGCACA | 2808 |
| 1571211.1 | 1144738 | AfuucaaggcuaL96 | | | auguGfcUfaauausgsu | | UUCAAGGCUC | |
| AD- | A- | csusuua(Ahd)AfuGfUf | 2099 | A-2901310 | VPusAfsuadTu(Tgn)gg | 2454 | UCCUUUAAAUGUU | 2809 |
| 1571212.1 | 1145040 | UfgccaaauauaL96 | | | caacAfuUfuaaagsgsa | | GCCAAAUAUA | |
| AD- | A- | asasaua(Uhd)AfuGfAf | 2100 | A-2901311 | VPusAfsucdCu(Agn)ga | 2455 | CCAAAUAUAUGAA | 2810 |
| 1571213.1 | 1145068 | AfuucuaggauaL96 | | | auucAfuAfuauuusgsg | | UUCUAGGAUU | |
| AD- | A- | uscsuuu(Chd)AfgGfGf | 2101 | A-2901312 | VPusAfsaudAg(Agn)uc | 2456 | UCUCUUUCAGGGA | 2811 |
| 1571214.1 | 1145152 | AfagaucuauuaL96 | | | uuccCfuGfaaagasgsa | | AGAUCUAUUA | |
| AD- | A- | gsasaua(Uhd)UfcUfAf | 2102 | A-2901313 | VPusCfsuadGc(Agn)ug | 2457 | CAGAAUAUUCUAG | 2812 |
| 1571215.1 | 1145338 | GfacaugcuagaL96 | | | ucuaGfaAfuauucsusg | | ACAUGCUAGC | |
| AD- | A- | usasuuc(Uhd)AfgAfCf | 2103 | A-2901314 | VPusCfsugdCu(Agn)gc | 2458 | AAUAUUCUAGACA | 2813 |
| 1571216.1 | 1145344 | AfugcuagcagaL96 | | | auguCfuAfgaauasusu | | UGCUAGCAGU | |
| AD- | A- | csusaga(Chd)AfuGfCf | 2104 | A-2901315 | VPusUfsaadAc(Tgn)gc | 2459 | UUCUAGACAUGCU | 2814 |
| 1571217.1 | 1145352 | UfagcaguuuaaL96 | | | uagcAfuGfucuagsasa | | AGCAGUUUAU | |
| AD- | A- | usgscua(Ghd)CfaGfUf | 2105 | A-2901316 | VPusAfsuadCa(Tgn)au | 2460 | CAUGCUAGCAGUU | 2815 |
| 1571218.1 | 1145366 | UfuauauguauaL96 | | | aaacUfgCfuagcasusg | | UAUAUGUAUU | |
| AD- | A- | gscsuag(Chd)AfgUfUf | 2106 | A-2901317 | VPusAfsaudAc(Agn)ua | 2461 | AUGCUAGCAGUUU | 2816 |
| 1571219.1 | 1145368 | UfauauguauuaL96 | | | uaaaCfuGfcuagcsasu | | AUAUGUAUUC | |
| AD- | A- | csasguu(Uhd)AfuAfUf | 2107 | A-2901318 | VPusUfscadTg(Agn)au | 2462 | AGCAGUUUAUAUG | 2817 |
| 1571220.1 | 1145378 | GfuauucaugaaL96 | | | acauAfuAfaacugscsu | | UAUUCAUGAG | |
| AD- | A- | gsusauu(Chd)AfuGfAf | 2108 | A-2901319 | VPusAfsucdAc(Agn)uu | 2463 | AUGUAUUCAUGAG | 2818 |
| 1571221.1 | 1145398 | GfuaaugugauaL96 | | | acucAfuGfaauacsasu | | UAAUGUGAUA | |
| AD- | A- | gsasaug(Ahd)GfuGfAf | 2109 | A-2901320 | VPusAfsucdCu(Tgn)au | 2464 | AGGAAUGAGUGAC | 2819 |
| 1571222.1 | 1145484 | CfuauaaggauaL96 | | | agucAfcUfcauucscsu | | UAUAAGGAUG | |
| AD- | A- | gsasgug(Ahd)CfuAfUf | 2110 | A-2901321 | VPusAfsacdCa(Tgn)cc | 2465 | AUGAGUGACUAUA | 2820 |
| 1571223.1 | 1145492 | AfaggaugguuaL96 | | | uuauAfgUfcacucsasu | | AGGAUGGUUA | |
| AD- | A- | gsascua(Uhd)AfaGfGf | 2111 | A-2901322 | VPusUfsggdTa(Agn)cc | 2466 | GUGACUAUAAGGA | 2821 |
| 1571224.1 | 1145500 | AfugguuaccaaL96 | | | auccUfuAfuagucsasc | | UGGUUACCAU | |
| AD- | A- | usasagg(Ahd)UfgGfUf | 2112 | A-2901323 | VPusUfsucdTa(Tgn)gg | 2467 | UAUAAGGAUGGUU | 2822 |
| 1571225.1 | 1145510 | UfaccauagaaaL96 | | | uaacCfaUfccuuasusa | | ACCAUAGAAA | |
| AD- | A- | gsasugg(Uhd)UfaCfCf | 2113 | A-2901324 | VPusAfsagdTu(Tgn)cu | 2468 | AGGAUGGUUACCA | 2823 |
| 1571226.1 | 1145518 | AfuagaaacuuaL96 | | | auggUfaAfccaucscsu | | UAGAAACUUC | |
| AD- | A- | asusggu(Uhd)AfcCfAf | 2114 | A-2901325 | VPusGfsaadGu(Tgn)uc | 2469 | GGAUGGUUACCAU | 2824 |
| 1571227.1 | 1145520 | UfagaaacuucaL96 | | | uaugGfuAfaccauscsc | | AGAAACUUCC | |
| AD | A- | gsusuac(Chd)AfuAfGf | 2115 | A-2901326 | VPusAfsagdGa(Agn)gu | 2470 | UGGUUACCAUAGA | 2825 |
| 1571228.1 | 1145526 | AfaacuuccuuaL96 | | | uucuAfuGfguaacscsa | | AACUUCCUUU | |
| AD- | A- | ususacc(Ahd)UfaGfAf | 2116 | A-2901327 | VPusAfsaadGg(Agn)ag | 2471 | GGUUACCAUAGAA | 2826 |
| 1571229.1 | 1145528 | AfacuuccuuuaL96 | | | uuucUfaUfgguaascsc | | ACUUCCUUUU | |
| AD- | A- | csusacu(Ahd)CfaGfAf | 2117 | A-2901328 | VPusAfsgcdTu(Agn)gc | 2472 | GACUACUACAGAG | 2827 |
| 1571230.1 | 1145572 | GfugcuaagcuaL96 | | | acucUfgUfaguagsusc | | UGCUAAGCUG | |
| AD- | A- | usgscua(Ahd)GfcUfGf | 2118 | A-2901329 | VPusAfsugdAc(Agn)ca | 2473 | AGUGCUAAGCUGC | 2828 |
| 1571231.1 | 1145594 | CfaugugucauaL96 | | | ugcaGfcUfuagcascsu | | AUGUGUCAUC | |
| AD- | A- | usgscau(Ghd)UfgUfCf | 2119 | A-2901330 | VPusAfsgudGu(Agn)ag | 2474 | GCUGCAUGUGUCA | 2829 |
| 1571232.1 | 1145610 | AfucuuacacuaL96 | | | augaCfaCfaugcasgsc | | UCUUACACUA | |
| AD- | A- | usasgag(Ahd)GfaAfAf | 2120 | A-2901331 | VPusAfsaadCu(Tgn)ac | 2475 | ACUAGAGAGAAAU | 2830 |
| 1571233.1 | 1145648 | UfgguaaguuuaL96 | | | cauuUfcUfcucuasgsu | | GGUAAGUUUC | |
| AD- | A- | asgsaga(Ghd)AfaAfUf | 2121 | A-2901332 | VPusGfsaadAc(Tgn)ua | 2476 | CUAGAGAGAAAUG | 2831 |
| 1571234.1 | 1145650 | GfguaaguuucaL96 | | | ccauUfuCfucucusasg | | GUAAGUUUCU | |
| AD- | A- | ususgaa(Chd)AfgUfAf | 2122 | A-2901333 | VPusUfsccdTg(Agn)aa | 2477 | UAUUGAACAGUAU | 2832 |
| 1571235.1 | 1145742 | UfauuucaggaaL96 | | | uauaCfuGfuucaasusa | | AUUUCAGGAA | |
| AD- | A- | csasgua(Uhd)AfuUfUf | 2123 | A-2901334 | VPusAfsacdCu(Tgn)cc | 2478 | AACAGUAUAUUUC | 2833 |
| 1571236.1 | 1145752 | CfaggaagguuaL96 | | | ugaaAfuAfuacugsusu | | AGGAAGGUUA | |
| AD- | A- | gsgsaaa(Ghd)UfuGfUf | 2124 | A-2901335 | VPusAfsuudCa(Tgn)gg | 2479 | UAGGAAAGUUGUG | 2834 |
| 1571237.1 | 1145972 | GfaccaugaauaL96 | | | ucacAfaCfuuuccsusa | | ACCAUGAAUU | |
| AD- | A- | asusuua(Uhd)GfuGfGf | 2125 | A-2901336 | VPusGfsaadTu(Tgn)gu | 2480 | GGAUUUAUGUGGA | 2835 |
| 1571238.1 | 1146022 | AfuacaaauucaL96 | | | auccAfcAfuaaauscsc | | UACAAAUUCU | |
| AD- | A- | usasugu(Ghd)GfaUfAf | 2126 | A-2901337 | VPusGfsgadGa(Agn)uu | 2481 | UUUAUGUGGAUAC | 2836 |
| 1571239.1 | 1146028 | CfaaauucuccaL96 | | | uguaUfcCfacauasasa | | AAAUUCUCCU | |
| AD- | A- | asasauu(Chd)UfcCfUf | 2127 | A-2901338 | VPusAfsacdAc(Tgn)uu | 2482 | ACAAAUUCUCCUU | 2837 |
| 1571240.1 | 1146050 | UfuaaaguguuaL96 | | | aaagGfaGfaauuusgsu | | UAAAGUGUUU | |
| AD- | A- | asusucu(Chd)CfuUfUf | 2128 | A-2901339 | VPusGfsaadAc(Agn)cu | 2483 | AAAUUCUCCUUUA | 2838 |
| 1571241.1 | 1146054 | AfaaguguuucaL96 | | | uuaaAfgGfagaaususu | | AAGUGUUUCU | |
| AD- | A- | uscscuu(Uhd)AfaAfGf | 2129 | A-2901340 | VPusGfsgadAg(Agn)aa | 2484 | UCUCCUUUAAAGU | 2839 |
| 1571242.1 | 1146062 | UfguuucuuccaL96 | | | cacuUfuAfaaggasgsa | | GUUUCUUCCC | |
| AD- | A- | csusuua(Ahd)AfgUfGf | 2130 | A-2901341 | VPusAfsggdGa(Agn)ga | 2485 | UCCUUUAAAGUGU | 2840 |
| 1571243.1 | 1146066 | UfuucuucccuaL96 | | | aacaCfuUfuaaagsgsa | | UUCUUCCCUU | |
| AD- | A- | ususuaa(Ahd)GfuGfUf | 2131 | A-2901342 | VPusAfsagdGg(Agn)ag | 2486 | CCUUUAAAGUGUU | 2841 |
| 1571244.1 | 1146068 | UfucuucccuuaL96 | | | aaacAfcUfuuaaasgsg | | UCUUCCCUUA | |
| AD- | A- | csusuac(Ahd)UfuCfUf | 2132 | A-2901343 | VPusAfsuadAc(Tgn)ug | 2487 | GACUUACAUUCUC | 2842 |
| 1571245.1 | 1146450 | CfccaaguuauaL96 | | | ggagAfaUfguaagsusc | | CCAAGUUAUU | |
| AD- | A- | asusucu(Chd)CfcAfAf | 2133 | A-2901344 | VPusGfscudGa(Agn)ua | 2488 | ACAUUCUCCCAAG | 2843 |
| 1571246.1 | 1146460 | GfuuauucagcaL96 | | | acuuGfgGfagaausgsu | | UUAUUCAGCC | |
| AD- | A- | ususauu(Chd)AfgCfCf | 2134 | A-2901345 | VPusAfsgudCa(Tgn)au | 2489 | AGUUAUUCAGCCU | 2844 |
| 1571247.1 | 1146482 | UfcauaugacuaL96 | | | gaggCfuGfaauaascsu | | CAUAUGACUC | |
| AD- | A- | asgsaac(Ahd)AfuCfUf | 2135 | A-2901346 | VPusAfsccdAc(Agn)ca | 2490 | ACAGAACAAUCUA | 2845 |
| 1571248.1 | 1146634 | AfaugugugguaL96 | | | uuagAfuUfguucusgsu | | AUGUGUGGUU | |
| AD- | A- | asascaa(Uhd)CfuAfAf | 2136 | A-2901347 | VPusAfsaadCc(Agn)ca | 2491 | AGAACAAUCUAAU | 2846 |
| 1571249.1 | 1146638 | UfgugugguuuaL96 | | | cauuAfgAfuuguuscsu | | GUGUGGUUUG | |
| AD- | A- | asasugu(Ghd)UfgGfUf | 2137 | A-2901348 | VPusGfsgadAu(Agn)cc | 2492 | CUAAUGUGUGGUU | 2847 |
| 1571250.1 | 1146654 | UfugguauuccaL96 | | | aaacCfaCfacauusasg | | UGGUAUUCCA | |
| AD- | A- | asusgug(Uhd)GfgUfU | 2138 | A-2901349 | VPusUfsggdAa(Tgn)ac | 2493 | UAAUGUGUGGUUU | 2848 |
| 1571251.1 | 1146656 | fUfgguauuccaaL96 | | | caaaCfcAfcacaususa | | GGUAUUCCAA | |
| AD- | A- | gsusgug(Ghd)UfuUfG | 2139 | A-2901350 | VPusCfsuudGg(Agn)au | 2494 | AUGUGUGGUUUGG | 2849 |
| 1571252.1 | 1146660 | fGfuauuccaagaL96 | | | accaAfaCfcacacsasu | | UAUUCCAAGU | |
| AD- | A- | usgsgcc(Ahd)UfuCfGf | 2140 | A-2901351 | VPusAfscadCu(G2p)uc | 2495 | AGUGGCCAUUCGA | 2850 |
| 1571253.1 | 1142114 | AfcgacaguguaL96 | | | gucgAfaUfggccascsu | | CGACAGUGUG | |
| AD- | A- | gsascga(Chd)AfgUfGf | 2141 | A-2901352 | VPusCfsuudTa(C2p)ac | 2496 | UCGACGACAGUGU | 2851 |
| 1571254.1 | 1142132 | UfgguguaaagaL96 | | | cacaCfuGfucgucsgsa | | GGUGUAAAGG | |
| AD- | A- | gscscau(Ghd)GfaUfGf | 2142 | A-2901353 | VPusUfsucdAu(G2p)aa | 2497 | UAGCCAUGGAUGU | 2852 |
| 1571255.1 | 1142192 | UfauucaugaaaL96 | | | uacaUfcCfauggcsusa | | AUUCAUGAAA | |
| AD- | A- | asusgga(Uhd)GfuAfUf | 2143 | A-2901354 | VPusCfscudTu(C2p)au | 2498 | CCAUGGAUGUAUU | 2853 |
| 1571256.1 | 1142198 | UfcaugaaaggaL96 | | | gaauAfcAfuccausgsg | | CAUGAAAGGA | |
| AD- | A- | asgsggu(Ghd)UfuCfUf | 2144 | A-2901355 | VPusGfsccdTa(C2p)au | 2499 | AGAGGGUGUUCUC | 2854 |
| 1571257.1 | 1142400 | CfuauguaggcaL96 | | | agagAfaCfacccuscsu | | UAUGUAGGCU | |
| AD- | A- | csasaag(Ahd)GfcAfAf | 2145 | A-2901356 | VPusCfsaudTu(G2p)uc | 2500 | ACCAAAGAGCAAG | 2855 |
| 1571258.1 | 1142546 | GfugacaaaugaL96 | | | acuuGfcUfcuuugsgsu | | UGACAAAUGU | |
| AD- | A- | asgscaa(Ghd)UfgAfCf | 2146 | A-2901357 | VPusUfsccdAa(C2p)au | 2501 | AGAGCAAGUGACA | 2856 |
| 1571259.1 | 1142556 | AfaauguuggaaL96 | | | uuguCfaCfuugcuscsu | | AAUGUUGGAG | |
| AD- | A- | ascsaau(Ghd)AfgGfCf | 2147 | A-2901358 | VPusCfsaudTu(C2p)au | 2502 | UGACAAUGAGGCU | 2857 |
| 1571260.1 | 1142876 | UfuaugaaaugaL96 | | | aagcCfuCfauuguscsa | | UAUGAAAUGC | |
| AD- | A- | csasguu(Uhd)CfuUfGf | 2148 | A-2901359 | VPusCfsagdCa(G2p)au | 2503 | CCCAGUUUCUUGA | 2858 |
| 1571261.1 | 1143032 | AfgaucugcugaL96 | | | cucaAfgAfaacugsgsg | | GAUCUGCUGA | |
| AD- | A- | usgsuac(Ahd)AfgUfGf | 2149 | A-2901360 | VPusUfsggdAa(C2p)ug | 2504 | CCUGUACAAGUGC | 2859 |
| 1571262.1 | 1143102 | CfucaguuccaaL96 | | | agcaCfuUfguacasgsg | | UCAGUUCCAA | |
| AD- | A- | csasagu(Ghd)CfuCfAf | 2150 | A-2901361 | VPusAfscadTu(G2p)ga | 2505 | UACAAGUGCUCAG | 2860 |
| 1571263.1 | 1143110 | GfuuccaauguaL96 | | | acugAfgCfacuugsusa | | UUCCAAUGUG | |
| AD- | A- | gsuscau(Ghd)AfcAfUf | 2151 | A-2901362 | VPusAfscudTu(G2p)ag | 2506 | CAGUCAUGACAUU | 2861 |
| 1571264.1 | 1143160 | UfucucaaaguaL96 | | | aaauGfuCfaugacsusg | | UCUCAAAGUU | |
| AD- | A- | uscsgaa(Ghd)UfcUfUf | 2152 | A-2901363 | VPusCfsugdCu(G2p)au | 2507 | UCUCGAAGUCUUC | 2862 |
| 1571265.1 | 1143228 | CfcaucagcagaL96 | | | ggaaGfaCfuucgasgsa | | CAUCAGCAGU | |
| AD- | A- | csasgca(Ghd)UfgAfUf | 2153 | A-2901364 | VPusAfsgadTa(C2p)uu | 2508 | AUCAGCAGUGAUU | 2863 |
| 1571266.1 | 1143256 | UfgaaguaucuaL96 | | | caauCfaCfugcugsasu | | GAAGUAUCUG | |
| AD- | A- | gscsuuc(Chd)CfuUfUf | 2154 | A-2901365 | VPusCfsacdTu(C2p)ag | 2509 | GUGCUUCCCUUUC | 2864 |
| 1571267.1 | 1143308 | CfacugaagugaL96 | | | ugaaAfgGfgaagcsasc | | ACUGAAGUGA | |
| AD- | A- | csascug(Ahd)AfgUfGf | 2155 | A-2901366 | VPusAfsccdAu(G2p)ua | 2510 | UUCACUGAAGUGA | 2865 |
| 1571268.1 | 1143328 | AfauacaugguaL96 | | | uucaCfuUfcagugsasa | | AUACAUGGUA | |
| AD- | A- | usgsaag(Uhd)GfaAfUf | 2156 | A-2901367 | VPusGfscudAc(C2p)au | 2511 | ACUGAAGUGAAUA | 2866 |
| 1571269.1 | 1143334 | AfcaugguagcaL96 | | | guauUfcAfcuucasgsu | | CAUGGUAGCA | |
| AD- | A- | csusaag(Uhd)GfaCfUf | 2157 | A-2901368 | VPusAfsaudAa(G2p)ug | 2512 | ACCUAAGUGACUA | 2867 |
| 1571270.1 | 1143480 | AfccacuuauuaL96 | | | guagUfcAfcuuagsgsu | | CCACUUAUUU | |
| AD- | A- | ascsuac(Chd)AfcUfUf | 2158 | A-2901369 | VPusAfsuudTa(G2p)aa | 2513 | UGACUACCACUUA | 2868 |
| 1571271.1 | 1143494 | AfuuucuaaauaL96 | | | auaaGfuGfguaguscsa | | UUUCUAAAUC | |
| AD- | A- | asusgug(Ahd)GfcAfUf | 2159 | A-2901370 | VPusGfscadTa(G2p)uu | 2514 | AUAUGUGAGCAUG | 2869 |
| 1571272.1 | 1143704 | GfaaacuaugcaL96 | | | ucauGfcUfcacausasu | | AAACUAUGCA | |
| AD- | A- | ascsacu(Ghd)CfcAfGf | 2160 | A-2901371 | VPusAfsaadCa(C2p)ac | 2515 | CAACACUGCCAGA | 2870 |
| 1571273.1 | 1144184 | AfaguguguuuaL96 | | | uucuGfgCfagugususg | | AGUGUGUUUU | |
| AD- | A- | csasaau(Ahd)UfaUfGf | 2161 | A-2901372 | VPusUfsccdTa(G2p)aa | 2516 | GCCAAAUAUAUGA | 2871 |
| 1571274.1 | 1145066 | AfauucuaggaaL96 | | | uucaUfaUfauuugsgsc | | AUUCUAGGAU | |
| AD- | A- | gsuscac(Uhd)AfgUfAf | 2162 | A-2901373 | VPusUfsuadTa(C2p)uu | 2517 | AAGUCACUAGUAG | 2872 |
| 1571275.1 | 1145282 | GfaaaguauaaaL96 | | | ucuaCfuAfgugacsusu | | AAAGUAUAAU | |
| AD- | A- | csasaga(Chd)AfgAfAf | 2163 | A-2901374 | VPusGfsucdTa(G2p)aa | 2518 | UUCAAGACAGAAU | 2873 |
| 1571276.1 | 1145324 | UfauucuagacaL96 | | | uauuCfuGfucuugsasa | | AUUCUAGACA | |
| AD- | A- | csusagc(Ahd)GfuUfUf | 2164 | A-2901375 | VPusGfsaadTa(C2p)au | 2519 | UGCUAGCAGUUUA | 2874 |
| 1571277.1 | 1145370 | AfuauguauucaL96 | | | auaaAfcUfgcuagscsa | | UAUGUAUUCA | |
| AD- | A- | usgsacu(Ahd)UfaAfGf | 2165 | A-2901376 | VPusGfsgudAa(C2p)ca | 2520 | AGUGACUAUAAGG | 2875 |
| 1571278.1 | 1145498 | GfaugguuaccaL96 | | | uccuUfaUfagucascsu | | AUGGUUACCA | |
| AD- | A- | gsgsuua(Chd)CfaUfAf | 2166 | A-2901377 | VPusAfsggdAa(G2p)uu | 2521 | AUGGUUACCAUAG | 2876 |
| 1571279.1 | 1145524 | GfaaacuuccuaL96 | | | ucuaUfgGfuaaccsasu | | AAACUUCCUU | |
| AD- | A- | usasagc(Uhd)GfcAfUf | 2167 | A-2901378 | VPusAfsagdAu(G2p)ac | 2522 | GCUAAGCUGCAUG | 2877 |
| 1571280.1 | 1145600 | GfugucaucuuaL96 | | | acauGfcAfgcuuasgsc | | UGUCAUCUUA | |
| AD- | A- | gscsugc(Ahd)UfgUfGf | 2168 | A-2901379 | VPusUfsgudAa(G2p)au | 2523 | AAGCUGCAUGUGU | 2878 |
| 1571281.1 | 1145606 | UfcaucuuacaaL96 | | | gacaCfaUfgcagcsusu | | CAUCUUACAC | |
| AD- | A- | ascsagu(Ahd)UfaUfUf | 2169 | A-2901380 | VPusAfsccdTu(C2p)cu | 2524 | GAACAGUAUAUUU | 2879 |
| 1571282.1 | 1145750 | UfcaggaagguaL96 | | | gaaaUfaUfacugususc | | CAGGAAGGUU | |
| AD- | A- | uscsuac(Chd)UfaAfAf | 2170 | A-2901381 | VPusAfsaudAu(G2p)cu | 2525 | AAUCUACCUAAAG | 2880 |
| 1571283.1 | 1145828 | GfcagcauauuaL96 | | | gcuuUfaGfguagasusu | | CAGCAUAUUU | |
| AD- | A- | usgsugg(Ahd)UfaCfAf | 2171 | A-2901382 | VPusAfsagdGa(G2p)aa | 2526 | UAUGUGGAUACAA | 2881 |
| 1571284.1 | 1146032 | AfauucuccuuaL96 | | | uuugUfaUfccacasusa | | AUUCUCCUUU | |
| AD- | A- | gsgsaua(Chd)AfaAfUf | 2172 | A-2901383 | VPusUfsuadAa(G2p)ga | 2527 | GUGGAUACAAAUU | 2882 |
| 1571285.1 | 1146038 | UfcuccuuuaaaL96 | | | gaauUfuGfuauccsasc | | CUCCUUUAAA | |
| AD- | A- | asasuuc(Uhd)CfcUfUf | 2173 | A-2901384 | VPusAfsaadCa(C2p)uu | 2528 | CAAAUUCUCCUUU | 2883 |
| 1571286.1 | 1146052 | UfaaaguguuuaL96 | | | uaaaGfgAfgaauususg | | AAAGUGUUUC | |
| AD- | A- | ususcuc(Chd)UfuUfAf | 2174 | A-2901385 | VPusAfsgadAa(C2p)ac | 2529 | AAUUCUCCUUUAA | 2884 |
| 1571287.1 | 1146056 | AfaguguuucuaL96 | | | uuuaAfaGfgagaasusu | | AGUGUUUCUU | |
| AD- | A- | asasagu(Ghd)UfuUfCf | 2175 | A-2901387 | VPusAfsuudAa(G2p)gg | 2530 | UUAAAGUGUUUCU | 2885 |
| 1571289.1 | 1146074 | UfucccuuaauaL96 | | | aagaAfaCfacuuusasa | | UCCCUUAAUA | |
| AD- | A- | usgscac(Uhd)UfuGfGf | 2176 | A-2901388 | VPusCfsaadTu(G2p)ug | 2531 | AGUGCACUUUGGC | 2886 |
| 1571290.1 | 1146584 | CfacacaauugaL96 | | | ugccAfaAfgugcascsu | | ACACAAUUGG | |
| AD- | A- | gsasaca(Ahd)UfcUfAf | 2177 | A-2901389 | VPusAfsacdCa(C2p)ac | 2532 | CAGAACAAUCUAA | 2887 |
| 1571291.1 | 1146636 | AfugugugguuaL96 | | | auuaGfaUfuguucsusg | | UGUGUGGUUU | |
| AD- | A- | csusaau(Ghd)UfgUfGf | 2178 | A-2901390 | VPusAfsaudAc(C2p)aa | 2533 | AUCUAAUGUGUGG | 2888 |
| 1571292.1 | 1146650 | GfuuugguauuaL96 | | | accaCfaCfauuagsasu | | UUUGGUAUUC | |
| AD- | A- | usasaug(Uhd)GfuGfGf | 2179 | A-2901391 | VPusGfsaadTa(C2p)caa | 2534 | UCUAAUGUGUGGU | 2889 |
| 1571293.1 | 1146652 | UfuugguauucaL96 | | | accAfcAfcauuasgsa | | UUGGUAUUCC | |

TABLE 13
Further SNCA-Targeting Duplex Sequences, Unmodified.

| | Sense | | SEQ | Range | Antisense | | SEQ | Range |
|---|---|---|---|---|---|---|---|---|
| Duplex | Oligo | Trans | ID | (NM_ | Oligo | Trans | ID | (NM_ |
| Name | Name | Sequence | NO: | 000345.4) | Name | Sequence | NO: | 000345.4) |
| AD-1548843.1 | A-2860862 | GACGACAGUGUGGU | 2890 | 193-213 | A-2860863 | UCUUTACACCACA | 3245 | 191-213 |
| | | GUAAAGA | | | | CUGUCGUCGA | | |
| AD-1548844.1 | A-2860864 | ACGACAGUGUGGUG | 2891 | 194-214 | A-2860865 | UCCUTUACACCAC | 3246 | 192-214 |
| | | UAAAGGA | | | | ACUGUCGUCG | | |
| AD-1548845.1 | A-2860866 | CGACAGUGUGGUGU | 2892 | 195-215 | A-2860867 | UTCCTUTACACCA | 3247 | 193-215 |
| | | AAAGGAA | | | | CACUGUCGUC | | |
| AD-1548851.1 | A-2860878 | UGUGGUGUAAAGGA | 2893 | 201-221 | A-2860879 | UAUGAATUCCUTU | 3248 | 199-221 |
| | | AUUCAUA | | | | ACACCACACU | | |
| AD-1548854.1 | A-2860884 | GGUGUAAAGGAAUU | 2894 | 204-224 | A-2860885 | UCUAAUGAAUUC | 3249 | 202-224 |
| | | CAUUAGA | | | | CUUUACACCAC | | |
| AD-1548869.1 | A-2860914 | AUUAGCCAUGGAUG | 2895 | 219-239 | A-2860915 | UTGAAUACAUCC | 3250 | 217-239 |
| | | UAUUCAA | | | | AUGGCUAAUGA | | |
| AD-1548870.1 | A-2860916 | UUAGCCAUGGAUGU | 2896 | 220-240 | A-2860917 | UAUGAATACAUC | 3251 | 218-240 |
| | | AUUCAUA | | | | CAUGGCUAAUG | | |
| AD-1548876.1 | A-2860928 | AUGGAUGUAUUCAU | 2897 | 226-246 | A-2860929 | UCCUTUCAUGAA | 3252 | 224-246 |
| | | GAAAGGA | | | | UACAUCCAUGG | | |
| AD-1548884.1 | A-2860944 | AUUCAUGAAAGGAC | 2898 | 234-254 | A-2860945 | UTUGAAAGUCCTU | 3253 | 232-254 |
| | | UUUCAAA | | | | UCAUGAAUAC | | |
| AD-1548886.1 | A-2860948 | UCAUGAAAGGACUU | 2899 | 236-256 | A-2860949 | UCUUTGAAAGUC | 3254 | 234-256 |
| | | UCAAAGA | | | | CUUUCAUGAAU | | |
| AD-1548887.1 | A-2860950 | CAUGAAAGGACUUU | 2900 | 237-257 | A-2860951 | UCCUTUGAAAGTC | 3255 | 235-257 |
| | | CAAAGGA | | | | CUUUCAUGAA | | |
| AD-1548888.1 | A-2860952 | AUGAAAGGACUUUC | 2901 | 238-258 | A-2860953 | UGCCTUTGAAAGU | 3256 | 236-258 |
| | | AAAGGCA | | | | CCUUUCAUGA | | |
| AD-1548975.1 | A-2861126 | AGAGGGUGUUCUCU | 2902 | 327-347 | A-2861127 | UCUACATAGAGA | 3257 | 325-347 |
| | | AUGUAGA | | | | ACACCCUCUUU | | |
| AD-1548976.1 | A-2861128 | GAGGGUGUUCUCUA | 2903 | 328-348 | A-2861129 | UCCUACAUAGAG | 3258 | 326-348 |
| | | UGUAGGA | | | | AACACCCUCUU | | |
| AD-1548978.1 | A-2861132 | GGGUGUUCUCUAUG | 2904 | 330-350 | A-2861133 | UAGCCUACAUAG | 3259 | 328-350 |
| | | UAGGCUA | | | | AGAACACCCUC | | |
| AD-1549037.1 | A-2861250 | UGGCUGAGAAGACC | 2905 | 389-409 | A-2861251 | UCUCTUTGGUCTU | 3260 | 387-409 |
| | | AAAGAGA | | | | CUCAGCCACU | | |
| AD-1549038.1 | A-2861252 | GGCUGAGAAGACCA | 2906 | 390-410 | A-2861253 | UGCUCUTUGGUC | 3261 | 388-410 |
| | | AAGAGCA | | | | UUCUCAGCCAC | | |
| AD-1549044.1 | A-2861264 | GAAGACCAAAGAGC | 2907 | 396-416 | A-2861265 | UTCACUTGCUCTU | 3262 | 394-416 |
| | | AAGUGAA | | | | UGGUCUUCUC | | |
| AD-1549052.1 | A-2861280 | AAGAGCAAGUGACA | 2908 | 404-424 | A-2861281 | UAACAUTUGUCA | 3263 | 402-424 |
| | | AAUGUUA | | | | CUUGCUCUUUG | | |
| AD-1549053.1 | A-2861282 | AGAGCAAGUGACAA | 2909 | 405-425 | A-2861283 | UCAACATUUGUC | 3264 | 403-425 |
| | | AUGUUGA | | | | ACUUGCUCUUU | | |
| AD-1549054.1 | A-2861284 | GAGCAAGUGACAAA | 2910 | 406-426 | A-2861285 | UCCAACAUUUGTC | 3265 | 404-426 |
| | | UGUUGGA | | | | ACUUGCUCUU | | |
| AD-1549055.1 | A-2861286 | AGCAAGUGACAAAU | 2911 | 407-427 | A-2861287 | UTCCAACAUUUG | 3266 | 405-427 |
| | | GUUGGAA | | | | UCACUUGCUCU | | |
| AD-1549210.1 | A-2861596 | UCCUGACAAUGAGG | 2912 | 582-602 | A-2861597 | UCAUAAGCCUCA | 3267 | 580-602 |
| | | CUUAUGA | | | | UUGUCAGGAUC | | |
| AD-1549211.1 | A-2861598 | CCUGACAAUGAGGC | 2913 | 583-603 | A-2861599 | UTCATAAGCCUCA | 3268 | 581-603 |
| | | UUAUGAA | | | | UUGUCAGGAU | | |
| AD-1549212.1 | A-2861600 | CUGACAAUGAGGCU | 2914 | 584-604 | A-2861601 | UTUCAUAAGCCTC | 3269 | 582-604 |
| | | UAUGAAA | | | | AUUGUCAGGA | | |
| AD-1549216.1 | A-2861608 | CAAUGAGGCUUAUG | 2915 | 588-608 | A-2861609 | UGCATUTCAUAAG | 3270 | 586-608 |
| | | AAAUGCA | | | | CCUCAUUGUC | | |
| AD-1549217.1 | A-2861610 | AAUGAGGCUUAUGA | 2916 | 589-609 | A-2861611 | UGGCAUTUCAUA | 3271 | 587-609 |
| | | AAUGCCA | | | | AGCCUCAUUGU | | |
| AD-1549222.1 | A-2861620 | GGCUUAUGAAAUGC | 2917 | 594-614 | A-2861621 | UCAGAAGGCAUT | 3272 | 592-614 |
| | | CUUCUGA | | | | UCAUAAGCCUC | | |
| AD-1549224.1 | A-2861624 | CUUAUGAAAUGCCU | 2918 | 596-616 | A-2861625 | UCUCAGAAGGCA | 3273 | 594-616 |
| | | UCUGAGA | | | | UUUCAUAAGCC | | |
| AD-1549225.1 | A-2861626 | UUAUGAAAUGCCUU | 2919 | 597-617 | A-2861627 | UCCUCAGAAGGC | 3274 | 595-617 |
| | | CUGAGGA | | | | AUUUCAUAAGC | | |
| AD-1549245.1 | A-2861666 | AAGGGUAUCAAGAC | 2920 | 617-637 | A-2861667 | UTUCGUAGUCUTG | 3275 | 615-637 |
| | | UACGAAA | | | | AUACCCUUCC | | |
| AD-1549246.1 | A-2861668 | AGGGUAUCAAGACU | 2921 | 618-638 | A-2861669 | UGUUCGTAGUCTU | 3276 | 616-638 |
| | | ACGAACA | | | | GAUACCCUUC | | |
| AD-1549249.1 | A-2861674 | GUAUCAAGACUACG | 2922 | 621-641 | A-2861675 | UCAGGUTCGUAG | 3277 | 619-641 |
| | | AACCUGA | | | | UCUUGAUACCC | | |
| AD-1549264.1 | A-2861704 | ACCUGAAGCCUAAG | 2923 | 636-656 | A-2861705 | UAUATUTCUUAG | 3278 | 634-656 |
| | | AAAUAUA | | | | GCUUCAGGUUC | | |
| AD-1549265.1 | A-2861706 | CCUGAAGCCUAAGA | 2924 | 637-657 | A-2861707 | UGAUAUTUCUUA | 3279 | 635-657 |
| | | AAUAUCA | | | | GGCUUCAGGUU | | |
| AD-1549266.1 | A-2861708 | CUGAAGCCUAAGAA | 2925 | 638-658 | A-2861709 | UAGATATUUCUTA | 3280 | 636-658 |
| | | AUAUCUA | | | | GGCUUCAGGU | | |
| AD-1549267.1 | A-2861710 | UGAAGCCUAAGAAA | 2926 | 639-659 | A-2861711 | UAAGAUAUUUCT | 3281 | 637-659 |
| | | UAUCUUA | | | | UAGGCUUCAGG | | |
| AD-1549268.1 | A-2861712 | GAAGCCUAAGAAAU | 2927 | 640-660 | A-2861713 | UAAAGATAUUUC | 3282 | 638-660 |
| | | AUCUUUA | | | | UUAGGCUUCAG | | |
| AD-1549269.1 | A-2861714 | AAGCCUAAGAAAUA | 2928 | 641-661 | A-2861715 | UCAAAGAUAUUT | 3283 | 639-661 |
| | | UCUUUGA | | | | CUUAGGCUUCA | | |
| AD-1549270.1 | A-2861716 | AGCCUAAGAAAUAU | 2929 | 642-662 | A-2861717 | UGCAAAGAUAUT | 3284 | 640-662 |
| | | CUUUGCA | | | | UCUUAGGCUUC | | |
| AD-1549271.1 | A-2861718 | GCCUAAGAAAUAUC | 2930 | 643-663 | A-2861719 | UAGCAAAGAUAT | 3285 | 641-663 |
| | | UUUGCUA | | | | UUCUUAGGCUU | | |
| AD-1549272.1 | A-2861720 | CCUAAGAAAUAUCU | 2931 | 644-664 | A-2861721 | UGAGCAAAGAUA | 3286 | 642-664 |
| | | UUGCUCA | | | | UUUCUUAGGCU | | |
| AD-1549280.1 | A-2861736 | AUAUCUUUGCUCCC | 2932 | 652-672 | A-2861737 | UGAAACTGGGAG | 3287 | 650-672 |
| | | AGUUUCA | | | | CAAAGAUAUUU | | |
| AD-1549281.1 | A-2861738 | UAUCUUUGCUCCCA | 2933 | 653-673 | A-2861739 | UAGAAACUGGGA | 3288 | 651-673 |
| | | GUUUCUA | | | | GCAAAGAUAUU | | |
| AD-1549282.1 | A-2861740 | AUCUUUGCUCCCAG | 2934 | 654-674 | A-2861741 | UAAGAAACUGGG | 3289 | 652-674 |
| | | UUUCUUA | | | | AGCAAAGAUAU | | |
| AD-1549283.1 | A-2861742 | UCUUUGCUCCCAGU | 2935 | 655-675 | A-2861743 | UCAAGAAACUGG | 3290 | 653-675 |
| | | UUCUUGA | | | | GAGCAAAGAUA | | |
| AD-1549284.1 | A-2861744 | CUUUGCUCCCAGUU | 2936 | 656-676 | A-2861745 | UTCAAGAAACUG | 3291 | 654-676 |
| | | UCUUGAA | | | | GGAGCAAAGAU | | |
| AD-1549285.1 | A-2861746 | UUUGCUCCCAGUUU | 2937 | 657-677 | A-2861747 | UCUCAAGAAACT | 3292 | 655-677 |
| | | CUUGAGA | | | | GGGAGCAAAGA | | |
| AD-1549290.1 | A-2861756 | UCCCAGUUUCUUGA | 2938 | 662-682 | A-2861757 | UCAGAUCUCAAG | 3293 | 660-682 |
| | | GAUCUGA | | | | AAACUGGGAGC | | |
| AD-1549293.1 | A-2861762 | CAGUUUCUUGAGAU | 2939 | 665-685 | A-2861763 | UCAGCAGAUCUC | 3294 | 663-685 |
| | | CUGCUGA | | | | AAGAAACUGGG | | |
| AD-1549333.1 | A-2861842 | AAGUGCUCAGUUCC | 2940 | 705-725 | A-2861843 | UCACAUTGGAAC | 3295 | 703-725 |
| | | AAUGUGA | | | | UGAGCACUUGU | | |
| AD-1549334.1 | A-2861844 | AGUGCUCAGUUCCA | 2941 | 706-726 | A-2861845 | UGCACATUGGAA | 3296 | 704-726 |
| | | AUGUGCA | | | | CUGAGCACUUG | | |
| AD-1549351.1 | A-2861878 | UGCCCAGUCAUGAC | 2942 | 723-743 | A-2861879 | UAGAAATGUCAT | 3297 | 721-743 |
| | | AUUUCUA | | | | GACUGGGCACA | | |
| AD-1549352.1 | A-2861880 | GCCCAGUCAUGACA | 2943 | 724-744 | A-2861881 | UGAGAAAUGUCA | 3298 | 722-744 |
| | | UUUCUCA | | | | UGACUGGGCAC | | |
| AD-1549353.1 | A-2861882 | CCCAGUCAUGACAU | 2944 | 725-745 | A-2861883 | UTGAGAAAUGUC | 3299 | 723-745 |
| | | UUCUCAA | | | | AUGACUGGGCA | | |
| AD-1549354.1 | A-2861884 | CCAGUCAUGACAUU | 2945 | 726-746 | A-2861885 | UTUGAGAAAUGT | 3300 | 724-746 |
| | | UCUCAAA | | | | CAUGACUGGGC | | |
| AD-1549357.1 | A-2861890 | GUCAUGACAUUUCU | 2946 | 729-749 | A-2861891 | UACUTUGAGAAA | 3301 | 727-749 |
| | | CAAAGUA | | | | UGUCAUGACUG | | |
| AD-1549359.1 | A-2861894 | CAUGACAUUUCUCA | 2947 | 731-751 | A-2861895 | UAAACUTUGAGA | 3302 | 729-751 |
| | | AAGUUUA | | | | AAUGUCAUGAC | | |
| AD-1549391.1 | A-2861958 | UCGAAGUCUUCCAU | 2948 | 763-783 | A-2861959 | UCUGCUGAUGGA | 3303 | 761-783 |
| | | CAGCAGA | | | | AGACUUCGAGA | | |
| AD-1549397.1 | A-2861970 | UCUUCCAUCAGCAG | 2949 | 769-789 | A-2861971 | UCAATCACUGCTG | 3304 | 767-789 |
| | | UGAUUGA | | | | AUGGAAGACU | | |
| AD-1549400.1 | A-2861976 | UCCAUCAGCAGUGA | 2950 | 772-792 | A-2861977 | UCUUCAAUCACTG | 3305 | 770-792 |
| | | UUGAAGA | | | | CUGAUGGAAG | | |
| AD-1549401.1 | A-2861978 | CCAUCAGCAGUGAU | 2951 | 773-793 | A-2861979 | UACUTCAAUCACU | 3306 | 771-793 |
| | | UGAAGUA | | | | GCUGAUGGAA | | |
| AD-1549403.1 | A-2861982 | AUCAGCAGUGAUUG | 2952 | 775-795 | A-2861983 | UAUACUTCAAUC | 3307 | 773-795 |
| | | AAGUAUA | | | | ACUGCUGAUGG | | |
| AD-1549406.1 | A-2861988 | AGCAGUGAUUGAAG | 2953 | 778-798 | A-2861989 | UCAGAUACUUCA | 3308 | 776-798 |
| | | UAUCUGA | | | | AUCACUGCUGA | | |
| AD-1549407.1 | A-2861990 | GCAGUGAUUGAAGU | 2954 | 779-799 | A-2861991 | UACAGATACUUC | 3309 | 777-799 |
| | | AUCUGUA | | | | AAUCACUGCUG | | |
| AD-1549412.1 | A-2862000 | GAUUGAAGUAUCUG | 2955 | 784-804 | A-2862001 | UCAGGUACAGAT | 3310 | 782-804 |
| | | UACCUGA | | | | ACUUCAAUCAC | | |
| AD-1549425.1 | A-2862026 | UUCGGUGCUUCCCU | 2956 | 818-838 | A-2862027 | UAGUGAAAGGGA | 3311 | 816-838 |
| | | UUCACUA | | | | AGCACCGAAAU | | |
| AD-1549426.1 | A-2862028 | UCGGUGCUUCCCUU | 2957 | 819-839 | A-2862029 | UCAGTGAAAGGG | 3312 | 817-839 |
| | | UCACUGA | | | | AAGCACCGAAA | | |
| AD-1549432.1 | A-2862040 | CUUCCCUUUCACUG | 2958 | 825-845 | A-2862041 | UTCACUTCAGUGA | 3313 | 823-845 |
| | | AAGUGAA | | | | AAGGGAAGCA | | |
| AD-1549438.1 | A-2862052 | UUUCACUGAAGUGA | 2959 | 831-851 | A-2862053 | UAUGTATUCACTU | 3314 | 829-851 |
| | | AUACAUA | | | | CAGUGAAAGG | | |
| AD-1549439.1 | A-2862054 | UUCACUGAAGUGAA | 2960 | 832-852 | A-2862055 | UCAUGUAUUCAC | 3315 | 830-852 |
| | | UACAUGA | | | | UUCAGUGAAAG | | |
| AD-1549441.1 | A-2862058 | CACUGAAGUGAAUA | 2961 | 834-854 | A-2862059 | UACCAUGUAUUC | 3316 | 832-854 |
| | | CAUGGUA | | | | ACUUCAGUGAA | | |
| AD-1549442.1 | A-2862060 | ACUGAAGUGAAUAC | 2962 | 835-855 | A-2862061 | UTACCATGUAUTC | 3317 | 833-855 |
| | | AUGGUAA | | | | ACUUCAGUGA | | |
| AD-1549443.1 | A-2862062 | CUGAAGUGAAUACA | 2963 | 836-856 | A-2862063 | UCUACCAUGUAT | 3318 | 834-856 |
| | | UGGUAGA | | | | UCACUUCAGUG | | |
| AD-1549517.1 | A-2862210 | CUAAGUGACUACCA | 2964 | 921-941 | A-2862211 | UAAUAAGUGGUA | 3319 | 919-941 |
| | | CUUAUUA | | | | GUCACUUAGGU | | |
| AD-1549518.1 | A-2862212 | UAAGUGACUACCAC | 2965 | 922-942 | A-2862213 | UAAATAAGUGGT | 3320 | 920-942 |
| | | UUAUUUA | | | | AGUCACUUAGG | | |
| AD-1549519.1 | A-2862214 | AAGUGACUACCACU | 2966 | 923-943 | A-2862215 | UGAAAUAAGUGG | 3321 | 921-943 |
| | | UAUUUCA | | | | UAGUCACUUAG | | |
| AD-1549520.1 | A-2862216 | AGUGACUACCACUU | 2967 | 924-944 | A-2862217 | UAGAAATAAGUG | 3322 | 922-944 |
| | | AUUUCUA | | | | GUAGUCACUUA | | |
| AD-1549521.1 | A-2862218 | GUGACUACCACUUA | 2968 | 925-945 | A-2862219 | UTAGAAAUAAGT | 3323 | 923-945 |
| | | UUUCUAA | | | | GGUAGUCACUU | | |
| AD-1549522.1 | A-2862220 | UGACUACCACUUAU | 2969 | 926-946 | A-2862221 | UTUAGAAAUAAG | 3324 | 924-946 |
| | | UUCUAAA | | | | UGGUAGUCACU | | |
| AD-1549524.1 | A-2862224 | ACUACCACUUAUUU | 2970 | 928-948 | A-2862225 | UAUUTAGAAAUA | 3325 | 926-948 |
| | | CUAAAUA | | | | AGUGGUAGUCA | | |
| AD-1549525.1 | A-2862226 | CUACCACUUAUUUC | 2971 | 929-949 | A-2862227 | UGAUTUAGAAAT | 3326 | 927-949 |
| | | UAAAUCA | | | | AAGUGGUAGUC | | |
| AD-1549527.1 | A-2862230 | ACCACUUAUUUCUA | 2972 | 931-951 | A-2862231 | UAGGAUTUAGAA | 3327 | 929-951 |
| | | AAUCCUA | | | | AUAAGUGGUAG | | |
| AD-1549541.1 | A-2862258 | UUGCUGUUGUUCAG | 2973 | 964-984 | A-2862259 | UCAACUTCUGAAC | 3328 | 962-984 |
| | | AAGUUGA | | | | AACAGCAACA | | |
| AD-1549542.1 | A-2862260 | UGCUGUUGUUCAGA | 2974 | 965-985 | A-2862261 | UACAACTUCUGA | 3329 | 963-985 |
| | | AGUUGUA | | | | ACAACAGCAAC | | |
| AD-1549543.1 | A-2862262 | GCUGUUGUUCAGAA | 2975 | 966-986 | A-2862263 | UAACAACUUCUG | 3330 | 964-986 |
| | | GUUGUUA | | | | AACAACAGCAA | | |
| AD-1549544.1 | A-2862264 | CUGUUGUUCAGAAG | 2976 | 967-987 | A-2862265 | UTAACAACUUCTG | 3331 | 965-987 |
| | | UUGUUAA | | | | AACAACAGCA | | |
| AD-1549545.1 | A-2862266 | UGUUGUUCAGAAGU | 2977 | 968-988 | A-2862267 | UCUAACAACUUC | 3332 | 966-988 |
| | | UGUUAGA | | | | UGAACAACAGC | | |
| AD-1549546.1 | A-2862268 | GUUGUUCAGAAGUU | 2978 | 969-989 | A-2862269 | UACUAACAACUTC | 3333 | 967-989 |
| | | GUUAGUA | | | | UGAACAACAG | | |
| AD-1549547.1 | A-2862270 | UUGUUCAGAAGUUG | 2979 | 970-990 | A-2862271 | UCACTAACAACTU | 3334 | 968-990 |
| | | UUAGUGA | | | | CUGAACAACA | | |
| AD-1549548.1 | A-2862272 | UGUUCAGAAGUUGU | 2980 | 971-991 | A-2862273 | UTCACUAACAACU | 3335 | 969-991 |
| | | UAGUGAA | | | | UCUGAACAAC | | |
| AD-1549552.1 | A-2862280 | CAGAAGUUGUUAGU | 2981 | 975-995 | A-2862281 | UCAAAUCACUAA | 3336 | 973-995 |
| | | GAUUUGA | | | | CAACUUCUGAA | | |
| AD-1549554.1 | A-2862284 | GAAGUUGUUAGUGA | 2982 | 977-997 | A-2862285 | UAGCAAAUCACT | 3337 | 975-997 |
| | | UUUGCUA | | | | AACAACUUCUG | | |
| AD-1549555.1 | A-2862286 | AAGUUGUUAGUGAU | 2983 | 978-998 | A-2862287 | UTAGCAAAUCAC | 3338 | 976-998 |
| | | UUGCUAA | | | | UAACAACUUCU | | |
| AD-1549556.1 | A-2862288 | AGUUGUUAGUGAUU | 2984 | 979-999 | A-2862289 | UAUAGCAAAUCA | 3339 | 977-999 |
| | | UGCUAUA | | | | CUAACAACUUC | | |
| AD-1549595.1 | A-2862366 | GAUACUGUCUAAGA | 2985 | 1032-1052 | A-2862367 | UCAUTATUCUUAG | 3340 | 1030-1052 |
| | | AUAAUGA | | | | ACAGUAUCAU | | |
| AD-1549596.1 | A-2862368 | AUACUGUCUAAGAA | 2986 | 1033-1053 | A-2862369 | UTCATUAUUCUTA | 3341 | 1031-1053 |
| | | UAAUGAA | | | | GACAGUAUCA | | |
| AD-1549615.1 | A-2862406 | ACGUAUUGUGAAAU | 2987 | 1052-1072 | A-2862407 | UTAACAAAUUUC | 3342 | 1050-1072 |
| | | UUGUUAA | | | | ACAAUACGUCA | | |
| AD-1549628.1 | A-2862432 | UAUGUGAGCAUGAA | 2988 | 1092-1112 | A-2862433 | UCAUAGTUUCATG | 3343 | 1090-1112 |
| | | ACUAUGA | | | | CUCACAUAUU | | |
| AD-1549630.1 | A-2862436 | UGUGAGCAUGAAAC | 2989 | 1094-1114 | A-2862437 | UTGCAUAGUUUC | 3344 | 1092-1114 |
| | | UAUGCAA | | | | AUGCUCACAUA | | |
| AD-1549639.1 | A-2862454 | GAAACUAUGCACCU | 2990 | 1103-1123 | A-2862455 | UAUUTATAGGUG | 3345 | 1101-1123 |
| | | AUAAAUA | | | | CAUAGUUUCAU | | |
| AD-1549640.1 | A-2862456 | AAACUAUGCACCUA | 2991 | 1104-1124 | A-2862457 | UTAUTUAUAGGTG | 3346 | 1102-1124 |
| | | UAAAUAA | | | | CAUAGUUUCA | | |
| AD-1549641.1 | A-2862458 | AACUAUGCACCUAU | 2992 | 1105-1125 | A-2862459 | UGUATUTAUAGG | 3347 | 1103-1125 |
| | | AAAUACA | | | | UGCAUAGUUUC | | |
| AD-1549642.1 | A-2862460 | ACUAUGCACCUAUA | 2993 | 1106-1126 | A-2862461 | UAGUAUTUAUAG | 3348 | 1104-1126 |
| | | AAUACUA | | | | GUGCAUAGUUU | | |
| AD-1549643.1 | A-2862462 | CUAUGCACCUAUAA | 2994 | 1107-1127 | A-2862463 | UTAGTATUUAUAG | 3349 | 1105-1127 |
| | | AUACUAA | | | | GUGCAUAGUU | | |
| AD-1549682.1 | A-2862540 | CUUGUGUUUGUAUA | 2995 | 1165-1185 | A-2862541 | UCAUTUAUAUAC | 3350 | 1163-1185 |
| | | UAAAUGA | | | | AAACACAAGUG | | |
| AD-1549683.1 | A-2862542 | UUGUGUUUGUAUAU | 2996 | 1166-1186 | A-2862543 | UCCATUTAUAUAC | 3351 | 1164-1186 |
| | | AAAUGGA | | | | AAACACAAGU | | |
| AD-1549684.1 | A-2862544 | UGUGUUUGUAUAUA | 2997 | 1167-1187 | A-2862545 | UACCAUTUAUATA | 3352 | 1165-1187 |
| | | AAUGGUA | | | | CAAACACAAG | | |
| AD-1549685.1 | A-2862546 | GUGUUUGUAUAUAA | 2998 | 1168-1188 | A-2862547 | UCACCATUUAUA | 3353 | 1166-1188 |
| | | AUGGUGA | | | | UACAAACACAA | | |
| AD-1549686.1 | A-2862548 | UGUUUGUAUAUAAA | 2999 | 1169-1189 | A-2862549 | UTCACCAUUUATA | 3354 | 1167-1189 |
| | | UGGUGAA | | | | UACAAACACA | | |
| AD-1549726.1 | A-2862628 | UAUCCCAUCUCACU | 3000 | 1233-1253 | A-2862629 | UTAUTAAAGUGA | 3355 | 1231-1253 |
| | | UUAAUAA | | | | GAUGGGAUAAA | | |
| AD-1549727.1 | A-2862630 | AUCCCAUCUCACUU | 3001 | 1234-1254 | A-2862631 | UTUATUAAAGUG | 3356 | 1232-1254 |
| | | UAAUAAA | | | | AGAUGGGAUAA | | |
| AD-1549728.1 | A-2862632 | UCCCAUCUCACUUU | 3002 | 1235-1255 | A-2862633 | UAUUAUTAAAGT | 3357 | 1233-1255 |
| | | AAUAAUA | | | | GAGAUGGGAUA | | |
| AD-1549729.1 | A-2862634 | CCCAUCUCACUUUA | 3003 | 1236-1256 | A-2862635 | UTAUTATUAAAGU | 3358 | 1234-1256 |
| | | AUAAUAA | | | | GAGAUGGGAU | | |
| AD-1550292.1 | A-2863760 | GCACAUAUUAGCAC | 3004 | 1816-1836 | A-2863761 | UTUGAATGUGCTA | 3359 | 1814-1836 |
| | | AUUCAAA | | | | AUAUGUGCUA | | |
| AD-1550346.1 | A-2863868 | AUAUUAGCACAUUC | 3005 | 1820-1840 | A-2863869 | UAGCCUTGAAUG | 3360 | 1818-1840 |
| | | AAGGCUA | | | | UGCUAAUAUGU | | |
| AD-1550458.1 | A-2864092 | UACAGGAAAUGCCU | 3006 | 1957-1977 | A-2864093 | UGUUTAAAGGCA | 3361 | 1955-1977 |
| | | UUAAACA | | | | UUUCCUGUAAA | | |
| AD-1550459.1 | A-2864094 | ACAGGAAAUGCCUU | 3007 | 1958-1978 | A-2864095 | UTGUTUAAAGGC | 3362 | 1956-1978 |
| | | UAAACAA | | | | AUUUCCUGUAA | | |
| AD-1550647.1 | A-2864470 | CUUUAAAUGUUGCC | 3008 | 2046-2066 | A-2864471 | UAUATUTGGCAAC | 3363 | 2044-2066 |
| | | AAAUAUA | | | | AUUUAAAGGA | | |
| AD-1550648.1 | A-2864472 | UUUAAAUGUUGCCA | 3009 | 2047-2067 | A-2864473 | UTAUAUTUGGCA | 3364 | 2045-2067 |
| | | AAUAUAA | | | | ACAUUUAAAGG | | |
| AD-1550656.1 | A-2864488 | UUGCCAAAUAUAUG | 3010 | 2055-2075 | A-2864489 | UAGAAUTCAUAT | 3365 | 2053-2075 |
| | | AAUUCUA | | | | AUUUGGCAACA | | |
| AD-1550657.1 | A-2864490 | UGCCAAAUAUAUGA | 3011 | 2056-2076 | A-2864491 | UTAGAATUCAUA | 3366 | 2054-2076 |
| | | AUUCUAA | | | | UAUUUGGCAAC | | |
| AD-1550658.1 | A-2864492 | GCCAAAUAUAUGAA | 3012 | 2057-2077 | A-2864493 | UCUAGAAUUCAT | 3367 | 2055-2077 |
| | | UUCUAGA | | | | AUAUUUGGCAA | | |
| AD-1550659.1 | A-2864494 | CCAAAUAUAUGAAU | 3013 | 2058-2078 | A-2864495 | UCCUAGAAUUCA | 3368 | 2056-2078 |
| | | UCUAGGA | | | | UAUAUUUGGCA | | |
| AD-1550660.1 | A-2864496 | CAAAUAUAUGAAUU | 3014 | 2059-2079 | A-2864497 | UTCCTAGAAUUCA | 3369 | 2057-2079 |
| | | CUAGGAA | | | | UAUAUUUGGC | | |
| AD-1550661.1 | A-2864498 | AAAUAUAUGAAUUC | 3015 | 2060-2080 | A-2864499 | UAUCCUAGAAUT | 3370 | 2058-2080 |
| | | UAGGAUA | | | | CAUAUAUUUGG | | |
| AD-1550755.1 | A-2864686 | UUUCAGGGAAGAUC | 3016 | 2104-2124 | A-2864687 | UTUAAUAGAUCT | 3371 | 2102-2124 |
| | | UAUUAAA | | | | UCCCUGAAAGA | | |
| AD-1550756.1 | A-2864688 | UUCAGGGAAGAUCU | 3017 | 2105-2125 | A-2864689 | UGUUAATAGAUC | 3372 | 2103-2125 |
| | | AUUAACA | | | | UUCCCUGAAAG | | |
| AD-1550757.1 | A-2864690 | UCAGGGAAGAUCUA | 3018 | 2106-2126 | A-2864691 | UAGUTAAUAGAT | 3373 | 2104-2126 |
| | | UUAACUA | | | | CUUCCCUGAAA | | |
| AD-1550758.1 | A-2864692 | CAGGGAAGAUCUAU | 3019 | 2107-2127 | A-2864693 | UGAGTUAAUAGA | 3374 | 2105-2127 |
| | | UAACUCA | | | | UCUUCCCUGAA | | |
| AD-1550869.1 | A-2864914 | UCACUAGUAGAAAG | 3020 | 2236-2256 | A-2864915 | UAUUAUACUUUC | 3375 | 2234-2256 |
| | | UAUAAUA | | | | UACUAGUGACU | | |
| AD-1550871.1 | A-2864918 | CUAGUAGAAAGUAU | 3021 | 2239-2259 | A-2864919 | UGAAAUTAUACT | 3376 | 2237-2259 |
| | | AAUUUCA | | | | UUCUACUAGUG | | |
| AD-1550887.1 | A-2864950 | UUCAAGACAGAAUA | 3022 | 2256-2276 | A-2864951 | UCUAGAAUAUUC | 3377 | 2254-2276 |
| | | UUCUAGA | | | | UGUCUUGAAAU | | |
| AD-1550888.1 | A-2864952 | UCAAGACAGAAUAU | 3023 | 2257-2277 | A-2864953 | UTCUAGAAUAUTC | 3378 | 2255-2277 |
| | | UCUAGAA | | | | UGUCUUGAAA | | |
| AD-1550949.1 | A-2865074 | UAUUCUAGACAUGC | 3024 | 2268-2288 | A-2865075 | UCUGCUAGCAUG | 3379 | 2266-2288 |
| | | UAGCAGA | | | | UCUAGAAUAUU | | |
| AD-1550954.1 | A-2865084 | UAGACAUGCUAGCA | 3025 | 2273-2293 | A-2865085 | UAUAAACUGCUA | 3380 | 2271-2293 |
| | | GUUUAUA | | | | GCAUGUCUAGA | | |
| AD-1550955.1 | A-2865086 | AGACAUGCUAGCAG | 3026 | 2274-2294 | A-2865087 | UTAUAAACUGCTA | 3381 | 2272-2294 |
| | | UUUAUAA | | | | GCAUGUCUAG | | |
| AD-1550956.1 | A-2865088 | GACAUGCUAGCAGU | 3027 | 2275-2295 | A-2865089 | UAUATAAACUGC | 3382 | 2273-2295 |
| | | UUAUAUA | | | | UAGCAUGUCUA | | |
| AD-1550957.1 | A-2865090 | ACAUGCUAGCAGUU | 3028 | 2276-2296 | A-2865091 | UCAUAUAAACUG | 3383 | 2274-2296 |
| | | UAUAUGA | | | | CUAGCAUGUCU | | |
| AD-1550958.1 | A-2865092 | CAUGCUAGCAGUUU | 3029 | 2277-2297 | A-2865093 | UACATATAAACTG | 3384 | 2275-2297 |
| | | AUAUGUA | | | | CUAGCAUGUC | | |
| AD-1550959.1 | A-2865094 | AUGCUAGCAGUUUA | 3030 | 2278-2298 | A-2865095 | UTACAUAUAAAC | 3385 | 2276-2298 |
| | | UAUGUAA | | | | UGCUAGCAUGU | | |
| AD-1550960.1 | A-2865096 | UGCUAGCAGUUUAU | 3031 | 2279-2299 | A-2865097 | UAUACATAUAAA | 3386 | 2277-2299 |
| | | AUGUAUA | | | | CUGCUAGCAUG | | |
| AD-1550961.1 | A-2865098 | GCUAGCAGUUUAUA | 3032 | 2280-2300 | A-2865099 | UAAUACAUAUAA | 3387 | 2278-2300 |
| | | UGUAUUA | | | | ACUGCUAGCAU | | |
| AD-1550963.1 | A-2865102 | UAGCAGUUUAUAUG | 3033 | 2282-2302 | A-2865103 | UTGAAUACAUAT | 3388 | 2280-2302 |
| | | UAUUCAA | | | | AAACUGCUAGC | | |
| AD-1550964.1 | A-2865104 | AGCAGUUUAUAUGU | 3034 | 2283-2303 | A-2865105 | UAUGAATACAUA | 3389 | 2281-2303 |
| | | AUUCAUA | | | | UAAACUGCUAG | | |
| AD-1550965.1 | A-2865106 | GCAGUUUAUAUGUA | 3035 | 2284-2304 | A-2865107 | UCAUGAAUACAT | 3390 | 2282-2304 |
| | | UUCAUGA | | | | AUAAACUGCUA | | |
| AD-1550984.1 | A-2865144 | AGUAAUGUGAUAUA | 3036 | 2304-2324 | A-2865145 | UCCAAUAUAUAT | 3391 | 2302-2324 |
| | | UAUUGGA | | | | CACAUUACUCA | | |
| AD-1551066.1 | A-2865308 | GAGGAAUGAGUGAC | 3037 | 2343-2363 | A-2865309 | UCUUAUAGUCAC | 3392 | 2341-2363 |
| | | UAUAAGA | | | | UCAUUCCUCCU | | |
| AD-1551067.1 | A-2865310 | AGGAAUGAGUGACU | 3038 | 2344-2364 | A-2865311 | UCCUTATAGUCAC | 3393 | 2342-2364 |
| | | AUAAGGA | | | | UCAUUCCUCC | | |
| AD-1551068.1 | A-2865312 | GGAAUGAGUGACUA | 3039 | 2345-2365 | A-2865313 | UTCCTUAUAGUCA | 3394 | 2343-2365 |
| | | UAAGGAA | | | | CUCAUUCCUC | | |
| AD-1551069.1 | A-2865314 | GAAUGAGUGACUAU | 3040 | 2346-2366 | A-2865315 | UAUCCUTAUAGTC | 3395 | 2344-2366 |
| | | AAGGAUA | | | | ACUCAUUCCU | | |
| AD-1551070.1 | A-2865316 | AAUGAGUGACUAUA | 3041 | 2347-2367 | A-2865317 | UCAUCCTUAUAG | 3396 | 2345-2367 |
| | | AGGAUGA | | | | UCACUCAUUCC | | |
| AD-1551073.1 | A-2865322 | GAGUGACUAUAAGG | 3042 | 2350-2370 | A-2865323 | UAACCATCCUUAU | 3397 | 2348-2370 |
| | | AUGGUUA | | | | AGUCACUCAU | | |
| AD-1551076.1 | A-2865328 | UGACUAUAAGGAUG | 3043 | 2353-2373 | A-2865329 | UGGUAACCAUCC | 3398 | 2351-2373 |
| | | GUUACCA | | | | UUAUAGUCACU | | |
| AD-1551077.1 | A-2865330 | GACUAUAAGGAUGG | 3044 | 2354-2374 | A-2865331 | UTGGTAACCAUCC | 3399 | 2352-2374 |
| | | UUACCAA | | | | UUAUAGUCAC | | |
| AD-1551078.1 | A-2865332 | ACUAUAAGGAUGGU | 3045 | 2355-2375 | A-2865333 | UAUGGUAACCAT | 3400 | 2353-2375 |
| | | UACCAUA | | | | CCUUAUAGUCA | | |
| AD-1551086.1 | A-2865348 | GAUGGUUACCAUAG | 3046 | 2363-2383 | A-2865349 | UAAGTUTCUAUG | 3401 | 2361-2383 |
| | | AAACUUA | | | | GUAACCAUCCU | | |
| AD-1551090.1 | A-2865356 | GUUACCAUAGAAAC | 3047 | 2367-2387 | A-2865357 | UAAGGAAGUUUC | 3402 | 2365-2387 |
| | | UUCCUUA | | | | UAUGGUAACCA | | |
| AD-1551091.1 | A-2865358 | UUACCAUAGAAACU | 3048 | 2368-2388 | A-2865359 | UAAAGGAAGUUT | 3403 | 2366-2388 |
| | | UCCUUUA | | | | CUAUGGUAACC | | |
| AD-1551164.1 | A-2865504 | UACUACAGAGUGCU | 3049 | 2409-2429 | A-2865505 | UCAGCUTAGCACU | 3404 | 2407-2429 |
| | | AAGCUGA | | | | CUGUAGUAGU | | |
| AD-1551170.1 | A-2865516 | AGAGUGCUAAGCUG | 3050 | 2415-2435 | A-2865517 | UCACAUGCAGCTU | 3405 | 2413-2435 |
| | | CAUGUGA | | | | AGCACUCUGU | | |
| AD-1551171.1 | A-2865518 | GAGUGCUAAGCUGC | 3051 | 2416-2436 | A-2865519 | UACACATGCAGCU | 3406 | 2414-2436 |
| | | AUGUGUA | | | | UAGCACUCUG | | |
| AD-1551177.1 | A-2865530 | UAAGCUGCAUGUGU | 3052 | 2422-2442 | A-2865531 | UAAGAUGACACA | 3407 | 2420-2442 |
| | | CAUCUUA | | | | UGCAGCUUAGC | | |
| AD-1551180.1 | A-2865536 | GCUGCAUGUGUCAU | 3053 | 2425-2445 | A-2865537 | UTGUAAGAUGAC | 3408 | 2423-2445 |
| | | CUUACAA | | | | ACAUGCAGCUU | | |
| AD-1551181.1 | A-2865538 | CUGCAUGUGUCAUC | 3054 | 2426-2446 | A-2865539 | UGUGTAAGAUGA | 3409 | 2424-2446 |
| | | UUACACA | | | | CACAUGCAGCU | | |
| AD-1551182.1 | A-2865540 | UGCAUGUGUCAUCU | 3055 | 2427-2447 | A-2865541 | UAGUGUAAGAUG | 3410 | 2425-2447 |
| | | UACACUA | | | | ACACAUGCAGC | | |
| AD-1551251.1 | A-2865678 | UAGAGAGAAAUGGU | 3056 | 2446-2466 | A-2865679 | UAAACUTACCATU | 3411 | 2444-2466 |
| | | AAGUUUA | | | | UCUCUCUAGU | | |
| AD-1551253.1 | A-2865682 | GAGAGAAAUGGUAA | 3057 | 2448-2468 | A-2865683 | UAGAAACUUACC | 3412 | 2446-2468 |
| | | GUUUCUA | | | | AUUUCUCUCUA | | |
| AD-1551254.1 | A-2865684 | AGAGAAAUGGUAAG | 3058 | 2449-2469 | A-2865685 | UAAGAAACUUAC | 3413 | 2447-2469 |
| | | UUUCUUA | | | | CAUUUCUCUCU | | |
| AD-1551255.1 | A-2865686 | GAGAAAUGGUAAGU | 3059 | 2450-2470 | A-2865687 | UCAAGAAACUUA | 3414 | 2448-2470 |
| | | UUCUUGA | | | | CCAUUUCUCUC | | |
| AD-1551256.1 | A-2865688 | AGAAAUGGUAAGUU | 3060 | 2451-2471 | A-2865689 | UACAAGAAACUT | 3415 | 2449-2471 |
| | | UCUUGUA | | | | ACCAUUUCUCU | | |
| AD-1551257.1 | A-2865690 | GAAAUGGUAAGUUU | 3061 | 2452-2472 | A-2865691 | UAACAAGAAACT | 3416 | 2450-2472 |
| | | CUUGUUA | | | | UACCAUUUCUC | | |
| AD-1551258.1 | A-2865692 | AAAUGGUAAGUUUC | 3062 | 2453-2473 | A-2865693 | UAAACAAGAAAC | 3417 | 2451-2473 |
| | | UUGUUUA | | | | UUACCAUUUCU | | |
| AD-1551346.1 | A-2865868 | UAUUGAACAGUAUA | 3063 | 2508-2528 | A-2865869 | UCUGAAAUAUAC | 3418 | 2506-2528 |
| | | UUUCAGA | | | | UGUUCAAUAAC | | |
| AD-1551347.1 | A-2865870 | AUUGAACAGUAUAU | 3064 | 2509-2529 | A-2865871 | UCCUGAAAUAUA | 3419 | 2507-2529 |
| | | UUCAGGA | | | | CUGUUCAAUAA | | |
| AD-1551353.1 | A-2865882 | CAGUAUAUUUCAGG | 3065 | 2515-2535 | A-2865883 | UAACCUTCCUGAA | 3420 | 2513-2535 |
| | | AAGGUUA | | | | AUAUACUGUU | | |
| AD-1551392.1 | A-2865960 | CUACCUAAAGCAGC | 3066 | 2565-2585 | A-2865961 | UAAATATGCUGCU | 3421 | 2563-2585 |
| | | AUAUUUA | | | | UUAGGUAGAU | | |
| AD-1551566.1 | A-2866308 | AAGUUGUGACCAUG | 3067 | 2673-2693 | A-2866309 | UTAAAUTCAUGG | 3422 | 2671-2693 |
| | | AAUUUAA | | | | UCACAACUUUC | | |
| AD-1551588.1 | A-2866352 | AUUUAUGUGGAUAC | 3068 | 2696-2716 | A-2866353 | UGAATUTGUAUCC | 3423 | 2694-2716 |
| | | AAAUUCA | | | | ACAUAAAUCC | | |
| AD-1551589.1 | A-2866354 | UUUAUGUGGAUACA | 3069 | 2697-2717 | A-2866355 | UAGAAUTUGUAT | 3424 | 2695-2717 |
| | | AAUUCUA | | | | CCACAUAAAUC | | |
| AD-1551590.1 | A-2866356 | UUAUGUGGAUACAA | 3070 | 2698-2718 | A-2866357 | UGAGAATUUGUA | 3425 | 2696-2718 |
| | | AUUCUCA | | | | UCCACAUAAAU | | |
| AD-1551592.1 | A-2866360 | AUGUGGAUACAAAU | 3071 | 2700-2720 | A-2866361 | UAGGAGAAUUUG | 3426 | 2698-2720 |
| | | UCUCCUA | | | | UAUCCACAUAA | | |
| AD-1551646.1 | A-2866468 | GGAUACAAAUUCUC | 3072 | 2704-2724 | A-2866469 | UTUAAAGGAGAA | 3427 | 2702-2724 |
| | | CUUUAAA | | | | UUUGUAUCCAC | | |
| AD-1551648.1 | A-2866472 | AUACAAAUUCUCCU | 3073 | 2706-2726 | A-2866473 | UCUUTAAAGGAG | 3428 | 2704-2726 |
| | | UUAAAGA | | | | AAUUUGUAUCC | | |
| AD-1551649.1 | A-2866474 | UACAAAUUCUCCUU | 3074 | 2707-2727 | A-2866475 | UACUTUAAAGGA | 3429 | 2705-2727 |
| | | UAAAGUA | | | | GAAUUUGUAUC | | |
| AD-1551650.1 | A-2866476 | ACAAAUUCUCCUUU | 3075 | 2708-2728 | A-2866477 | UCACTUTAAAGGA | 3430 | 2706-2728 |
| | | AAAGUGA | | | | GAAUUUGUAU | | |
| AD-1551651.1 | A-2866478 | CAAAUUCUCCUUUA | 3076 | 2709-2729 | A-2866479 | UACACUTUAAAG | 3431 | 2707-2729 |
| | | AAGUGUA | | | | GAGAAUUUGUA | | |
| AD-1551653.1 | A-2866482 | AAUUCUCCUUUAAA | 3077 | 2711-2731 | A-2866483 | UAAACACUUUAA | 3432 | 2709-2731 |
| | | GUGUUUA | | | | AGGAGAAUUUG | | |
| AD-1551655.1 | A-2866486 | UUCUCCUUUAAAGU | 3078 | 2713-2733 | A-2866487 | UAGAAACACUUT | 3433 | 2711-2733 |
| | | GUUUCUA | | | | AAAGGAGAAUU | | |
| AD-1551656.1 | A-2866488 | UCUCCUUUAAAGUG | 3079 | 2714-2734 | A-2866489 | UAAGAAACACUT | 3434 | 2712-2734 |
| | | UUUCUUA | | | | UAAAGGAGAAU | | |
| AD-1551657.1 | A-2866490 | CUCCUUUAAAGUGU | 3080 | 2715-2735 | A-2866491 | UGAAGAAACACT | 3435 | 2713-2735 |
| | | UUCUUCA | | | | UUAAAGGAGAA | | |
| AD-1551658.1 | A-2866492 | UCCUUUAAAGUGUU | 3081 | 2716-2736 | A-2866493 | UGGAAGAAACAC | 3436 | 2714-2736 |
| | | UCUUCCA | | | | UUUAAAGGAGA | | |
| AD-1551659.1 | A-2866494 | CCUUUAAAGUGUUU | 3082 | 2717-2737 | A-2866495 | UGGGAAGAAACA | 3437 | 2715-2737 |
| | | CUUCCCA | | | | CUUUAAAGGAG | | |
| AD-1551661.1 | A-2866498 | UUUAAAGUGUUUCU | 3083 | 2719-2739 | A-2866499 | UAAGGGAAGAAA | 3438 | 2717-2739 |
| | | UCCCUUA | | | | CACUUUAAAGG | | |
| AD-1551665.1 | A-2866506 | AAGUGUUUCUUCCC | 3084 | 2723-2743 | A-2866507 | UTAUTAAGGGAA | 3439 | 2721-2743 |
| | | UUAAUAA | | | | GAAACACUUUA | | |
| AD-1551666.1 | A-2866508 | AGUGUUUCUUCCCU | 3085 | 2724-2744 | A-2866509 | UAUATUAAGGGA | 3440 | 2722-2744 |
| | | UAAUAUA | | | | AGAAACACUUU | | |
| AD-1551667.1 | A-2866510 | GUGUUUCUUCCCUU | 3086 | 2725-2745 | A-2866511 | UAAUAUTAAGGG | 3441 | 2723-2745 |
| | | AAUAUUA | | | | AAGAAACACUU | | |
| AD-1551668.1 | A-2866512 | GUUUCUUCCCUUAA | 3087 | 2727-2747 | A-2866513 | UTAAAUAUUAAG | 3442 | 2725-2747 |
| | | UAUUUAA | | | | GGAAGAAACAC | | |
| AD-1551670.1 | A-2866516 | UUCUUCCCUUAAUA | 3088 | 2729-2749 | A-2866517 | UGAUAAAUAUUA | 3443 | 2727-2749 |
| | | UUUAUCA | | | | AGGGAAGAAAC | | |
| AD-1551672.1 | A-2866520 | CUUCCCUUAAUAUU | 3089 | 2731-2751 | A-2866521 | UCAGAUAAAUAT | 3444 | 2729-2751 |
| | | UAUCUGA | | | | UAAGGGAAGAA | | |
| AD-1552052.1 | A-2867280 | CUUACAUUCUCCCA | 3090 | 2935-2955 | A-2867281 | UAUAACTUGGGA | 3445 | 2933-2955 |
| | | AGUUAUA | | | | GAAUGUAAGUC | | |
| AD-1552053.1 | A-2867282 | UUACAUUCUCCCAA | 3091 | 2936-2956 | A-2867283 | UAAUAACUUGGG | 3446 | 2934-2956 |
| | | GUUAUUA | | | | AGAAUGUAAGU | | |
| AD-1552054.1 | A-2867284 | UACAUUCUCCCAAG | 3092 | 2937-2957 | A-2867285 | UGAATAACUUGG | 3447 | 2935-2957 |
| | | UUAUUCA | | | | GAGAAUGUAAG | | |
| AD-1552055.1 | A-2867286 | ACAUUCUCCCAAGU | 3093 | 2938-2958 | A-2867287 | UTGAAUAACUUG | 3448 | 2936-2958 |
| | | UAUUCAA | | | | GGAGAAUGUAA | | |
| AD-1552056.1 | A-2867288 | CAUUCUCCCAAGUU | 3094 | 2939-2959 | A-2867289 | UCUGAATAACUTG | 3449 | 2937-2959 |
| | | AUUCAGA | | | | GGAGAAUGUA | | |
| AD-1552057.1 | A-2867290 | AUUCUCCCAAGUUA | 3095 | 2940-2960 | A-2867291 | UGCUGAAUAACT | 3450 | 2938-2960 |
| | | UUCAGCA | | | | UGGGAGAAUGU | | |
| AD-1552065.1 | A-2867306 | AAGUUAUUCAGCCU | 3096 | 2948-2968 | A-2867307 | UCAUAUGAGGCT | 3451 | 2946-2968 |
| | | CAUAUGA | | | | GAAUAACUUGG | | |
| AD-1552066.1 | A-2867308 | AGUUAUUCAGCCUC | 3097 | 2949-2969 | A-2867309 | UTCATATGAGGCU | 3452 | 2947-2969 |
| | | AUAUGAA | | | | GAAUAACUUG | | |
| AD-1552067.1 | A-2867310 | GUUAUUCAGCCUCA | 3098 | 2950-2970 | A-2867311 | UGUCAUAUGAGG | 3453 | 2948-2970 |
| | | UAUGACA | | | | CUGAAUAACUU | | |
| AD-1552158.1 | A-2867492 | ACAGUUCAGAGUGC | 3099 | 2991-3011 | A-2867493 | UCAAAGTGCACTC | 3454 | 2989-3011 |
| | | ACUUUGA | | | | UGAACUGUUU | | |
| AD-1552159.1 | A-2867494 | CAGUUCAGAGUGCA | 3100 | 2992-3012 | A-2867495 | UCCAAAGUGCAC | 3455 | 2990-3012 |
| | | CUUUGGA | | | | UCUGAACUGUU | | |
| AD-1552161.1 | A-2867498 | GUUCAGAGUGCACU | 3101 | 2994-3014 | A-2867499 | UTGCCAAAGUGC | 3456 | 2992-3014 |
| | | UUGGCAA | | | | ACUCUGAACUG | | |
| AD-1552169.1 | A-2867514 | UGCACUUUGGCACA | 3102 | 3002-3022 | A-2867515 | UCAATUGUGUGC | 3457 | 3000-3022 |
| | | CAAUUGA | | | | CAAAGUGCACU | | |
| AD-1552191.1 | A-2867558 | AACAGAACAAUCUA | 3103 | 3024-3044 | A-2867559 | UACACATUAGATU | 3458 | 3022-3044 |
| | | AUGUGUA | | | | GUUCUGUUCC | | |
| AD-1552192.1 | A-2867560 | ACAGAACAAUCUAA | 3104 | 3025-3045 | A-2867561 | UCACACAUUAGA | 3459 | 3023-3045 |
| | | UGUGUGA | | | | UUGUUCUGUUC | | |
| AD-1552193.1 | A-2867562 | CAGAACAAUCUAAU | 3105 | 3026-3046 | A-2867563 | UCCACACAUUAG | 3460 | 3024-3046 |
| | | GUGUGGA | | | | AUUGUUCUGUU | | |
| AD-1552244.1 | A-2867664 | AGAACAAUCUAAUG | 3106 | 3027-3047 | A-2867665 | UACCACACAUUA | 3461 | 3025-3047 |
| | | UGUGGUA | | | | GAUUGUUCUGU | | |
| AD-1552247.1 | A-2867670 | ACAAUCUAAUGUGU | 3107 | 3030-3050 | A-2867671 | UCAAACCACACA | 3462 | 3028-3050 |
| | | GGUUUGA | | | | UUAGAUUGUUC | | |
| AD-1552248.1 | A-2867672 | CAAUCUAAUGUGUG | 3108 | 3031-3051 | A-2867673 | UCCAAACCACACA | 3463 | 3029-3051 |
| | | GUUUGGA | | | | UUAGAUUGUU | | |
| AD-1552249.1 | A-2867674 | AAUCUAAUGUGUGG | 3109 | 3032-3052 | A-2867675 | UACCAAACCACAC | 3464 | 3030-3052 |
| | | UUUGGUA | | | | AUUAGAUUGU | | |
| AD-1552250.1 | A-2867676 | AUCUAAUGUGUGGU | 3110 | 3033-3053 | A-2867677 | UTACCAAACCACA | 3465 | 3031-3053 |
| | | UUGGUAA | | | | CAUUAGAUUG | | |
| AD-1552251.1 | A-2867678 | UCUAAUGUGUGGUU | 3111 | 3034-3054 | A-2867679 | UAUACCAAACCA | 3466 | 3032-3054 |
| | | UGGUAUA | | | | CACAUUAGAUU | | |
| AD-1552253.1 | A-2867682 | UAAUGUGUGGUUUG | 3112 | 3036-3056 | A-2867683 | UGAATACCAAACC | 3467 | 3034-3056 |
| | | GUAUUCA | | | | ACACAUUAGA | | |
| AD-1552254.1 | A-2867684 | AAUGUGUGGUUUGG | 3113 | 3037-3057 | A-2867685 | UGGAAUACCAAA | 3468 | 3035-3057 |
| | | UAUUCCA | | | | CCACACAUUAG | | |
| AD-1552255.1 | A-2867686 | AUGUGUGGUUUGGU | 3114 | 3038-3058 | A-2867687 | UTGGAATACCAAA | 3469 | 3036-3058 |
| | | AUUCCAA | | | | CCACACAUUA | | |
| AD-1552257.1 | A-2867690 | GUGUGGUUUGGUAU | 3115 | 3040-3060 | A-2867691 | UCUUGGAAUACC | 3470 | 3038-3060 |
| | | UCCAAGA | | | | AAACCACACAU | | |
| AD-1571164.1 | A-1142146 | GUGUGGUGUAAAGG | 3116 | 200-220 | A-2901262 | UUGAAUTCCUUU | 3471 | 198-220 |
| | | AAUUCAA | | | | ACACCACACUG | | |
| AD-1571165.1 | A-1142150 | GUGGUGUAAAGGAA | 3117 | 202-222 | A-2901263 | UAAUGAAUUCCU | 3472 | 200-222 |
| | | UUCAUUA | | | | UUACACCACAC | | |
| AD-1571166.1 | A-1142190 | AGCCAUGGAUGUAU | 3118 | 222-242 | A-2901264 | UUCATGAAUACA | 3473 | 220-242 |
| | | UCAUGAA | | | | UCCAUGGCUAA | | |
| AD-1571167.1 | A-1142200 | UGGAUGUAUUCAUG | 3119 | 227-247 | A-2901265 | UUCCTUTCAUGAA | 3474 | 225-247 |
| | | AAAGGAA | | | | UACAUCCAUG | | |
| AD-1571168.1 | A-1142214 | AUUCAUGAAAGGAC | 3120 | 234-254 | A-2901266 | UUUGAAAGUCCU | 3475 | 232-254 |
| | | UUUCAAA | | | | UUCAUGAAUAC | | |
| AD-1571169.1 | A-1142222 | AUGAAAGGACUUUC | 3121 | 238-258 | A-2901267 | UGCCTUTGAAAGU | 3476 | 236-258 |
| | | AAAGGCA | | | | CCUUUCAUGA | | |
| AD-1571170.1 | A-1142224 | UGAAAGGACUUUCA | 3122 | 239-259 | A-2901268 | UGGCCUTUGAAA | 3477 | 237-259 |
| | | AAGGCCA | | | | GUCCUUUCAUG | | |
| AD-1571171.1 | A-1142402 | GGGUGUUCUCUAUG | 3123 | 330-350 | A-2901269 | UAGCCUACAUAG | 3478 | 328-350 |
| | | UAGGCUA | | | | AGAACACCCUC | | |
| AD-1571172.1 | A-1142522 | GGCUGAGAAGACCA | 3124 | 390-410 | A-2901270 | UGCUCUTUGGUC | 3479 | 388-410 |
| | | AAGAGCA | | | | UUCUCAGCCAC | | |
| AD-1571173.1 | A-1142534 | GAAGACCAAAGAGC | 3125 | 396-416 | A-2901271 | UUCACUTGCUCUU | 3480 | 394-416 |
| | | AAGUGAA | | | | UGGUCUUCUC | | |
| AD-1571174.1 | A-1142868 | CCUGACAAUGAGGC | 3126 | 583-603 | A-2901272 | UUCATAAGCCUCA | 3481 | 581-603 |
| | | UUAUGAA | | | | UUGUCAGGAU | | |
| AD-1571175.1 | A-1142878 | CAAUGAGGCUUAUG | 3127 | 588-608 | A-2901273 | UGCATUTCAUAAG | 3482 | 586-608 |
| | | AAAUGCA | | | | CCUCAUUGUC | | |
| AD-1571176.1 | A-1142880 | AAUGAGGCUUAUGA | 3128 | 589-609 | A-2901274 | UGGCAUTUCAUA | 3483 | 587-609 |
| | | AAUGCCA | | | | AGCCUCAUUGU | | |
| AD-1571177.1 | A-1142902 | UGAAAUGCCUUCUG | 3129 | 600-620 | A-2901275 | UCUUCCTCAGAAG | 3484 | 598-620 |
| | | AGGAAGA | | | | GCAUUUCAUA | | |
| AD-1571178.1 | A-1142936 | AAGGGUAUCAAGAC | 3130 | 617-637 | A-2901276 | UUUCGUAGUCUU | 3485 | 615-637 |
| | | UACGAAA | | | | GAUACCCUUCC | | |
| AD-1571179.1 | A-1142938 | AGGGUAUCAAGACU | 3131 | 618-638 | A-2901277 | UGUUCGTAGUCU | 3486 | 616-638 |
| | | ACGAACA | | | | UGAUACCCUUC | | |
| AD-1571180.1 | A-1142974 | ACCUGAAGCCUAAG | 3132 | 636-656 | A-2901278 | UAUATUTCUUAG | 3487 | 634-656 |
| | | AAAUAUA | | | | GCUUCAGGUUC | | |
| AD-1571181.1 | A-1142978 | CUGAAGCCUAAGAA | 3133 | 638-658 | A-2901279 | UAGATATUUCUU | 3488 | 636-658 |
| | | AUAUCUA | | | | AGGCUUCAGGU | | |
| AD-1571182.1 | A-1142982 | GAAGCCUAAGAAAU | 3134 | 640-660 | A-2901280 | UAAAGATAUUUC | 3489 | 638-660 |
| | | AUCUUUA | | | | UUAGGCUUCAG | | |
| AD-1571183.1 | A-1142992 | CUAAGAAAUAUCUU | 3135 | 645-665 | A-2901281 | UGGAGCAAAGAU | 3490 | 643-665 |
| | | UGCUCCA | | | | AUUUCUUAGGC | | |
| AD-1571184.1 | A-1143006 | AUAUCUUUGCUCCC | 3136 | 652-672 | A-2901282 | UGAAACTGGGAG | 3491 | 650-672 |
| | | AGUUUCA | | | | CAAAGAUAUUU | | |
| AD-1571185.1 | A-1143018 | UUGCUCCCAGUUUC | 3137 | 658-678 | A-2901283 | UUCUCAAGAAAC | 3492 | 656-678 |
| | | UUGAGAA | | | | UGGGAGCAAAG | | |
| AD-1571186.1 | A-1143020 | UGCUCCCAGUUUCU | 3138 | 659-679 | A-2901284 | UAUCTCAAGAAA | 3493 | 657-679 |
| | | UGAGAUA | | | | CUGGGAGCAAA | | |
| AD-1571187.1 | A-1143100 | CUGUACAAGUGCUC | 3139 | 699-719 | A-2901285 | UGGAACTGAGCA | 3494 | 697-719 |
| | | AGUUCCA | | | | CUUGUACAGGA | | |
| AD-1571188.1 | A-1143104 | GUACAAGUGCUCAG | 3140 | 701-721 | A-2901286 | UUUGGAACUGAG | 3495 | 699-721 |
| | | UUCCAAA | | | | CACUUGUACAG | | |
| AD-1571189.1 | A-1143154 | CCAGUCAUGACAUU | 3141 | 726-746 | A-2901287 | UUUGAGAAAUGU | 3496 | 724-746 |
| | | UCUCAAA | | | | CAUGACUGGGC | | |
| AD-1571190.1 | A-1143240 | UCUUCCAUCAGCAG | 3142 | 769-789 | A-2901288 | UCAATCACUGCUG | 3497 | 767-789 |
| | | UGAUUGA | | | | AUGGAAGACU | | |
| AD-1571191.1 | A-1143244 | UUCCAUCAGCAGUG | 3143 | 771-791 | A-2901289 | UUUCAATCACUGC | 3498 | 769-791 |
| | | AUUGAAA | | | | UGAUGGAAGA | | |
| AD-1571192.1 | A-1143248 | CCAUCAGCAGUGAU | 3144 | 773-793 | A-2901290 | UACUTCAAUCACU | 3499 | 771-793 |
| | | UGAAGUA | | | | GCUGAUGGAA | | |
| AD-1571193.1 | A-1143252 | AUCAGCAGUGAUUG | 3145 | 775-795 | A-2901291 | UAUACUTCAAUC | 3500 | 773-795 |
| | | AAGUAUA | | | | ACUGCUGAUGG | | |
| AD-1571194.1 | A-1143260 | GCAGUGAUUGAAGU | 3146 | 779-799 | A-2901292 | UACAGATACUUC | 3501 | 777-799 |
| | | AUCUGUA | | | | AAUCACUGCUG | | |
| AD-1571195.1 | A-1143310 | CUUCCCUUUCACUG | 3147 | 825-845 | A-2901293 | UUCACUTCAGUG | 3502 | 823-845 |
| | | AAGUGAA | | | | AAAGGGAAGCA | | |
| AD-1571196.1 | A-1143324 | UUCACUGAAGUGAA | 3148 | 832-852 | A-2901294 | UCAUGUAUUCAC | 3503 | 830-852 |
| | | UACAUGA | | | | UUCAGUGAAAG | | |
| AD-1571197.1 | A-1143326 | UCACUGAAGUGAAU | 3149 | 833-853 | A-2901295 | UCCATGTAUUCAC | 3504 | 831-853 |
| | | ACAUGGA | | | | UUCAGUGAAA | | |
| AD-1571198.1 | A-1143330 | ACUGAAGUGAAUAC | 3150 | 835-855 | A-2901296 | UUACCATGUAUU | 3505 | 833-855 |
| | | AUGGUAA | | | | CACUUCAGUGA | | |
| AD-1571199.1 | A-1143496 | CUACCACUUAUUUC | 3151 | 929-949 | A-2901297 | UGAUTUAGAAAU | 3506 | 927-949 |
| | | UAAAUCA | | | | AAGUGGUAGUC | | |
| AD-1571200.1 | A-1143498 | UACCACUUAUUUCU | 3152 | 930-950 | A-2901298 | UGGATUTAGAAA | 3507 | 928-950 |
| | | AAAUCCA | | | | UAAGUGGUAGU | | |
| AD-1571201.1 | A-1143502 | CCACUUAUUUCUAA | 3153 | 932-952 | A-2901299 | UGAGGATUUAGA | 3508 | 930-952 |
| | | AUCCUCA | | | | AAUAAGUGGUA | | |
| AD-1571202.1 | A-1143558 | AGUUGUUAGUGAUU | 3154 | 979-999 | A-2901300 | UAUAGCAAAUCA | 3509 | 977-999 |
| | | UGCUAUA | | | | CUAACAACUUC | | |
| AD-1571203.1 | A-1143638 | AUACUGUCUAAGAA | 3155 | 1033-1053 | A-2901301 | UUCATUAUUCUU | 3510 | 1031-1053 |
| | | UAAUGAA | | | | AGACAGUAUCA | | |
| AD-1571204.1 | A-1143700 | AUAUGUGAGCAUGA | 3156 | 1091-1111 | A-2901302 | UAUAGUTUCAUG | 3511 | 1089-1111 |
| | | AACUAUA | | | | CUCACAUAUUU | | |
| AD-1571205.1 | A-1143702 | UAUGUGAGCAUGAA | 3157 | 1092-1112 | A-2901303 | UCAUAGTUUCAU | 3512 | 1090-1112 |
| | | ACUAUGA | | | | GCUCACAUAUU | | |
| AD-1571206.1 | A-1143706 | UGUGAGCAUGAAAC | 3158 | 1094-1114 | A-2901304 | UUGCAUAGUUUC | 3513 | 1092-1114 |
| | | UAUGCAA | | | | AUGCUCACAUA | | |
| AD-1571207.1 | A-1143728 | AACUAUGCACCUAU | 3159 | 1105-1125 | A-2901305 | UGUATUTAUAGG | 3514 | 1103-1125 |
| | | AAAUACA | | | | UGCAUAGUUUC | | |
| AD-1571208.1 | A-1143732 | CUAUGCACCUAUAA | 3160 | 1107-1127 | A-2901306 | UUAGTATUUAUA | 3515 | 1105-1127 |
| | | AUACUAA | | | | GGUGCAUAGUU | | |
| AD-1571209.1 | A-1143818 | UGUUUGUAUAUAAA | 3161 | 1169-1189 | A-2901307 | UUCACCAUUUAU | 3516 | 1167-1189 |
| | | UGGUGAA | | | | AUACAAACACA | | |
| AD-1571210.1 | A-1143904 | CCCAUCUCACUUUA | 3162 | 1236-1256 | A-2901308 | UUAUTATUAAAG | 3517 | 1234-1256 |
| | | AUAAUAA | | | | UGAGAUGGGAU | | |
| AD-1571211.1 | A-1144738 | AUAUUAGCACAUUC | 3163 | 1820-1840 | A-2901309 | UAGCCUTGAAUG | 3518 | 1818-1840 |
| | | AAGGCUA | | | | UGCUAAUAUGU | | |
| AD-1571212.1 | A-1145040 | CUUUAAAUGUUGCC | 3164 | 2046-2066 | A-2901310 | UAUATUTGGCAAC | 3519 | 2044-2066 |
| | | AAAUAUA | | | | AUUUAAAGGA | | |
| AD-1571213.1 | A-1145068 | AAAUAUAUGAAUUC | 3165 | 2060-2080 | A-2901311 | UAUCCUAGAAUU | 3520 | 2058-2080 |
| | | UAGGAUA | | | | CAUAUAUUUGG | | |
| AD-1571214.1 | A-1145152 | UCUUUCAGGGAAGA | 3166 | 2102-2122 | A-2901312 | UAAUAGAUCUUC | 3521 | 2100-2122 |
| | | UCUAUUA | | | | CCUGAAAGAGA | | |
| AD-1571215.1 | A-1145338 | GAAUAUUCUAGACA | 3167 | 2265-2285 | A-2901313 | UCUAGCAUGUCU | 3522 | 2263-2285 |
| | | UGCUAGA | | | | AGAAUAUUCUG | | |
| AD-1571216.1 | A-1145344 | UAUUCUAGACAUGC | 3168 | 2268-2288 | A-2901314 | UCUGCUAGCAUG | 3523 | 2266-2288 |
| | | UAGCAGA | | | | UCUAGAAUAUU | | |
| AD-1571217.1 | A-1145352 | CUAGACAUGCUAGC | 3169 | 2272-2292 | A-2901315 | UUAAACTGCUAG | 3524 | 2270-2292 |
| | | AGUUUAA | | | | CAUGUCUAGAA | | |
| AD-1571218.1 | A-1145366 | UGCUAGCAGUUUAU | 3170 | 2279-2299 | A-2901316 | UAUACATAUAAA | 3525 | 2277-2299 |
| | | AUGUAUA | | | | CUGCUAGCAUG | | |
| AD-1571219.1 | A-1145368 | GCUAGCAGUUUAUA | 3171 | 2280-2300 | A-2901317 | UAAUACAUAUAA | 3526 | 2278-2300 |
| | | UGUAUUA | | | | ACUGCUAGCAU | | |
| AD-1571220.1 | A-1145378 | CAGUUUAUAUGUAU | 3172 | 2285-2305 | A-2901318 | UUCATGAAUACA | 3527 | 2283-2305 |
| | | UCAUGAA | | | | UAUAAACUGCU | | |
| AD-1571221.1 | A-1145398 | GUAUUCAUGAGUAA | 3173 | 2295-2315 | A-2901319 | UAUCACAUUACU | 3528 | 2293-2315 |
| | | UGUGAUA | | | | CAUGAAUACAU | | |
| AD-1571222.1 | A-1145484 | GAAUGAGUGACUAU | 3174 | 2346-2366 | A-2901320 | UAUCCUTAUAGU | 3529 | 2344-2366 |
| | | AAGGAUA | | | | CACUCAUUCCU | | |
| AD-1571223.1 | A-1145492 | GAGUGACUAUAAGG | 3175 | 2350-2370 | A-2901321 | UAACCATCCUUAU | 3530 | 2348-2370 |
| | | AUGGUUA | | | | AGUCACUCAU | | |
| AD-1571224.1 | A-1145500 | GACUAUAAGGAUGG | 3176 | 2354-2374 | A-2901322 | UUGGTAACCAUCC | 3531 | 2352-2374 |
| | | UUACCAA | | | | UUAUAGUCAC | | |
| AD-1571225.1 | A-1145510 | UAAGGAUGGUUACC | 3177 | 2359-2379 | A-2901323 | UUUCTATGGUAAC | 3532 | 2357-2379 |
| | | AUAGAAA | | | | CAUCCUUAUA | | |
| AD-1571226.1 | A-1145518 | GAUGGUUACCAUAG | 3178 | 2363-2383 | A-2901324 | UAAGTUTCUAUG | 3533 | 2361-2383 |
| | | AAACUUA | | | | GUAACCAUCCU | | |
| AD-1571227.1 | A-1145520 | AUGGUUACCAUAGA | 3179 | 2364-2384 | A-2901325 | UGAAGUTUCUAU | 3534 | 2362-2384 |
| | | AACUUCA | | | | GGUAACCAUCC | | |
| AD-1571228.1 | A-1145526 | GUUACCAUAGAAAC | 3180 | 2367-2387 | A-2901326 | UAAGGAAGUUUC | 3535 | 2365-2387 |
| | | UUCCUUA | | | | UAUGGUAACCA | | |
| AD-1571229.1 | A-1145528 | UUACCAUAGAAACU | 3181 | 2368-2388 | A-2901327 | UAAAGGAAGUUU | 3536 | 2366-2388 |
| | | UCCUUUA | | | | CUAUGGUAACC | | |
| AD-1571230.1 | A-1145572 | CUACUACAGAGUGC | 3182 | 2408-2428 | A-2901328 | UAGCTUAGCACUC | 3537 | 2406-2428 |
| | | UAAGCUA | | | | UGUAGUAGUC | | |
| AD-1571231.1 | A-1145594 | UGCUAAGCUGCAUG | 3183 | 2419-2439 | A-2901329 | UAUGACACAUGC | 3538 | 2417-2439 |
| | | UGUCAUA | | | | AGCUUAGCACU | | |
| AD-1571232.1 | A-1145610 | UGCAUGUGUCAUCU | 3184 | 2427-2447 | A-2901330 | UAGUGUAAGAUG | 3539 | 2425-2447 |
| | | UACACUA | | | | ACACAUGCAGC | | |
| AD-1571233.1 | A-1145648 | UAGAGAGAAAUGGU | 3185 | 2446-2466 | A-2901331 | UAAACUTACCAU | 3540 | 2444-2466 |
| | | AAGUUUA | | | | UUCUCUCUAGU | | |
| AD-1571234.1 | A-1145650 | AGAGAGAAAUGGUA | 3186 | 2447-2467 | A-2901332 | UGAAACTUACCA | 3541 | 2445-2467 |
| | | AGUUUCA | | | | UUUCUCUCUAG | | |
| AD-1571235.1 | A-1145742 | UUGAACAGUAUAUU | 3187 | 2510-2530 | A-2901333 | UUCCTGAAAUAU | 3542 | 2508-2530 |
| | | UCAGGAA | | | | ACUGUUCAAUA | | |
| AD-1571236.1 | A-1145752 | CAGUAUAUUUCAGG | 3188 | 2515-2535 | A-2901334 | UAACCUTCCUGAA | 3543 | 2513-2535 |
| | | AAGGUUA | | | | AUAUACUGUU | | |
| AD-1571237.1 | A-1145972 | GGAAAGUUGUGACC | 3189 | 2670-2690 | A-2901335 | UAUUCATGGUCA | 3544 | 2668-2690 |
| | | AUGAAUA | | | | CAACUUUCCUA | | |
| AD-1571238.1 | A-1146022 | AUUUAUGUGGAUAC | 3190 | 2696-2716 | A-2901336 | UGAATUTGUAUCC | 3545 | 2694-2716 |
| | | AAAUUCA | | | | ACAUAAAUCC | | |
| AD-1571239.1 | A-1146028 | UAUGUGGAUACAAA | 3191 | 2699-2719 | A-2901337 | UGGAGAAUUUGU | 3546 | 2697-2719 |
| | | UUCUCCA | | | | AUCCACAUAAA | | |
| AD-1571240.1 | A-1146050 | AAAUUCUCCUUUAA | 3192 | 2710-2730 | A-2901338 | UAACACTUUAAA | 3547 | 2708-2730 |
| | | AGUGUUA | | | | GGAGAAUUUGU | | |
| AD-1571241.1 | A-1146054 | AUUCUCCUUUAAAG | 3193 | 2712-2732 | A-2901339 | UGAAACACUUUA | 3548 | 2710-2732 |
| | | UGUUUCA | | | | AAGGAGAAUUU | | |
| AD-1571242.1 | A-1146062 | UCCUUUAAAGUGUU | 3194 | 2716-2736 | A-2901340 | UGGAAGAAACAC | 3549 | 2714-2736 |
| | | UCUUCCA | | | | UUUAAAGGAGA | | |
| AD-1571243.1 | A-1146066 | CUUUAAAGUGUUUC | 3195 | 2718-2738 | A-2901341 | UAGGGAAGAAAC | 3550 | 2716-2738 |
| | | UUCCCUA | | | | ACUUUAAAGGA | | |
| AD-1571244.1 | A-1146068 | UUUAAAGUGUUUCU | 3196 | 2719-2739 | A-2901342 | UAAGGGAAGAAA | 3551 | 2717-2739 |
| | | UCCCUUA | | | | CACUUUAAAGG | | |
| AD-1571245.1 | A-1146450 | CUUACAUUCUCCCA | 3197 | 2935-2955 | A-2901343 | UAUAACTUGGGA | 3552 | 2933-2955 |
| | | AGUUAUA | | | | GAAUGUAAGUC | | |
| AD-1571246.1 | A-1146460 | AUUCUCCCAAGUUA | 3198 | 2940-2960 | A-2901344 | UGCUGAAUAACU | 3553 | 2938-2960 |
| | | UUCAGCA | | | | UGGGAGAAUGU | | |
| AD-1571247.1 | A-1146482 | UUAUUCAGCCUCAU | 3199 | 2951-2971 | A-2901345 | UAGUCATAUGAG | 3554 | 2949-2971 |
| | | AUGACUA | | | | GCUGAAUAACU | | |
| AD-1571248.1 | A-1146634 | AGAACAAUCUAAUG | 3200 | 3027-3047 | A-2901346 | UACCACACAUUA | 3555 | 3025-3047 |
| | | UGUGGUA | | | | GAUUGUUCUGU | | |
| AD-1571249.1 | A-1146638 | AACAAUCUAAUGUG | 3201 | 3029-3049 | A-2901347 | UAAACCACACAU | 3556 | 3027-3049 |
| | | UGGUUUA | | | | UAGAUUGUUCU | | |
| AD-1571250.1 | A-1146654 | AAUGUGUGGUUUGG | 3202 | 3037-3057 | A-2901348 | UGGAAUACCAAA | 3557 | 3035-3057 |
| | | UAUUCCA | | | | CCACACAUUAG | | |
| AD-1571251.1 | A-1146656 | AUGUGUGGUUUGGU | 3203 | 3038-3058 | A-2901349 | UUGGAATACCAA | 3558 | 3036-3058 |
| | | AUUCCAA | | | | ACCACACAUUA | | |
| AD-1571252.1 | A-1146660 | GUGUGGUUUGGUAU | 3204 | 3040-3060 | A-2901350 | UCUUGGAAUACC | 3559 | 3038-3060 |
| | | UCCAAGA | | | | AAACCACACAU | | |
| AD-1571253.1 | A-1142114 | UGGCCAUUCGACGA | 3205 | 184-204 | A-2901351 | UACACUGUCGUC | 3560 | 182-204 |
| | | CAGUGUA | | | | GAAUGGCCACU | | |
| AD-1571254.1 | A-1142132 | GACGACAGUGUGGU | 3206 | 193-213 | A-2901352 | UCUUTACACCACA | 3561 | 191-213 |
| | | GUAAAGA | | | | CUGUCGUCGA | | |
| AD-1571255.1 | A-1142192 | GCCAUGGAUGUAUU | 3207 | 223-243 | A-2901353 | UUUCAUGAAUAC | 3562 | 221-243 |
| | | CAUGAAA | | | | AUCCAUGGCUA | | |
| AD-1571256.1 | A-1142198 | AUGGAUGUAUUCAU | 3208 | 226-246 | A-2901354 | UCCUTUCAUGAA | 3563 | 224-246 |
| | | GAAAGGA | | | | UACAUCCAUGG | | |
| AD-1571257.1 | A-1142400 | AGGGUGUUCUCUAU | 3209 | 329-349 | A-2901355 | UGCCTACAUAGA | 3564 | 327-349 |
| | | GUAGGCA | | | | GAACACCCUCU | | |
| AD-1571258.1 | A-1142546 | CAAAGAGCAAGUGA | 3210 | 402-422 | A-2901356 | UCAUTUGUCACU | 3565 | 400-422 |
| | | CAAAUGA | | | | UGCUCUUUGGU | | |
| AD-1571259.1 | A-1142556 | AGCAAGUGACAAAU | 3211 | 407-427 | A-2901357 | UUCCAACAUUUG | 3566 | 405-427 |
| | | GUUGGAA | | | | UCACUUGCUCU | | |
| AD-1571260.1 | A-1142876 | ACAAUGAGGCUUAU | 3212 | 587-607 | A-2901358 | UCAUTUCAUAAG | 3567 | 585-607 |
| | | GAAAUGA | | | | CCUCAUUGUCA | | |
| AD-1571261.1 | A-1143032 | CAGUUUCUUGAGAU | 3213 | 665-685 | A-2901359 | UCAGCAGAUCUC | 3568 | 663-685 |
| | | CUGCUGA | | | | AAGAAACUGGG | | |
| AD-1571262.1 | A-1143102 | UGUACAAGUGCUCA | 3214 | 700-720 | A-2901360 | UUGGAACUGAGC | 3569 | 698-720 |
| | | GUUCCAA | | | | ACUUGUACAGG | | |
| AD-1571263.1 | A-1143110 | CAAGUGCUCAGUUC | 3215 | 704-724 | A-2901361 | UACATUGGAACU | 3570 | 702-724 |
| | | CAAUGUA | | | | GAGCACUUGUA | | |
| AD-1571264.1 | A-1143160 | GUCAUGACAUUUCU | 3216 | 729-749 | A-2901362 | UACUTUGAGAAA | 3571 | 727-749 |
| | | CAAAGUA | | | | UGUCAUGACUG | | |
| AD-1571265.1 | A-1143228 | UCGAAGUCUUCCAU | 3217 | 763-783 | A-2901363 | UCUGCUGAUGGA | 3572 | 761-783 |
| | | CAGCAGA | | | | AGACUUCGAGA | | |
| AD-1571266.1 | A-1143256 | CAGCAGUGAUUGAA | 3218 | 777-797 | A-2901364 | UAGATACUUCAA | 3573 | 775-797 |
| | | GUAUCUA | | | | UCACUGCUGAU | | |
| AD-1571267.1 | A-1143308 | GCUUCCCUUUCACU | 3219 | 824-844 | A-2901365 | UCACTUCAGUGA | 3574 | 822-844 |
| | | GAAGUGA | | | | AAGGGAAGCAC | | |
| AD-1571268.1 | A-1143328 | CACUGAAGUGAAUA | 3220 | 834-854 | A-2901366 | UACCAUGUAUUC | 3575 | 832-854 |
| | | CAUGGUA | | | | ACUUCAGUGAA | | |
| AD-1571269.1 | A-1143334 | UGAAGUGAAUACAU | 3221 | 837-857 | A-2901367 | UGCUACCAUGUA | 3576 | 835-857 |
| | | GGUAGCA | | | | UUCACUUCAGU | | |
| AD-1571270.1 | A-1143480 | CUAAGUGACUACCA | 3222 | 921-941 | A-2901368 | UAAUAAGUGGUA | 3577 | 919-941 |
| | | CUUAUUA | | | | GUCACUUAGGU | | |
| AD-1571271.1 | A-1143494 | ACUACCACUUAUUU | 3223 | 928-948 | A-2901369 | UAUUTAGAAAUA | 3578 | 926-948 |
| | | CUAAAUA | | | | AGUGGUAGUCA | | |
| AD-1571272.1 | A-1143704 | AUGUGAGCAUGAAA | 3224 | 1093-1113 | A-2901370 | UGCATAGUUUCA | 3579 | 1091-1113 |
| | | CUAUGCA | | | | UGCUCACAUAU | | |
| AD-1571273.1 | A-1144184 | ACACUGCCAGAAGU | 3225 | 1402-1422 | A-2901371 | UAAACACACUUC | 3580 | 1400-1422 |
| | | GUGUUUA | | | | UGGCAGUGUUG | | |
| AD-1571274.1 | A-1145066 | CAAAUAUAUGAAUU | 3226 | 2059-2079 | A-2901372 | UUCCTAGAAUUC | 3581 | 2057-2079 |
| | | CUAGGAA | | | | AUAUAUUUGGC | | |
| AD-1571275.1 | A-1145282 | GUCACUAGUAGAAA | 3227 | 2235-2255 | A-2901373 | UUUATACUUUCU | 3582 | 2233-2255 |
| | | GUAUAAA | | | | ACUAGUGACUU | | |
| AD-1571276.1 | A-1145324 | CAAGACAGAAUAUU | 3228 | 2258-2278 | A-2901374 | UGUCTAGAAUAU | 3583 | 2256-2278 |
| | | CUAGACA | | | | UCUGUCUUGAA | | |
| AD-1571277.1 | A-1145370 | CUAGCAGUUUAUAU | 3229 | 2281-2301 | A-2901375 | UGAATACAUAUA | 3584 | 2279-2301 |
| | | GUAUUCA | | | | AACUGCUAGCA | | |
| AD-1571278.1 | A-1145498 | UGACUAUAAGGAUG | 3230 | 2353-2373 | A-2901376 | UGGUAACCAUCC | 3585 | 2351-2373 |
| | | GUUACCA | | | | UUAUAGUCACU | | |
| AD-1571279.1 | A-1145524 | GGUUACCAUAGAAA | 3231 | 2366-2386 | A-2901377 | UAGGAAGUUUCU | 3586 | 2364-2386 |
| | | CUUCCUA | | | | AUGGUAACCAU | | |
| AD-1571280.1 | A-1145600 | UAAGCUGCAUGUGU | 3232 | 2422-2442 | A-2901378 | UAAGAUGACACA | 3587 | 2420-2442 |
| | | CAUCUUA | | | | UGCAGCUUAGC | | |
| AD-1571281.1 | A-1145606 | GCUGCAUGUGUCAU | 3233 | 2425-2445 | A-2901379 | UUGUAAGAUGAC | 3588 | 2423-2445 |
| | | CUUACAA | | | | ACAUGCAGCUU | | |
| AD-1571282.1 | A-1145750 | ACAGUAUAUUUCAG | 3234 | 2514-2534 | A-2901380 | UACCTUCCUGAAA | 3589 | 2512-2534 |
| | | GAAGGUA | | | | UAUACUGUUC | | |
| AD-1571283.1 | A-1145828 | UCUACCUAAAGCAG | 3235 | 2564-2584 | A-2901381 | UAAUAUGCUGCU | 3590 | 2562-2584 |
| | | CAUAUUA | | | | UUAGGUAGAUU | | |
| AD-1571284.1 | A-1146032 | UGUGGAUACAAAUU | 3236 | 2701-2721 | A-2901382 | UAAGGAGAAUUU | 3591 | 2699-2721 |
| | | CUCCUUA | | | | GUAUCCACAUA | | |
| AD-1571285.1 | A-1146038 | GGAUACAAAUUCUC | 3237 | 2704-2724 | A-2901383 | UUUAAAGGAGAA | 3592 | 2702-2724 |
| | | CUUUAAA | | | | UUUGUAUCCAC | | |
| AD-1571286.1 | A-1146052 | AAUUCUCCUUUAAA | 3238 | 2711-2731 | A-2901384 | UAAACACUUUAA | 3593 | 2709-2731 |
| | | GUGUUUA | | | | AGGAGAAUUUG | | |
| AD-1571287.1 | A-1146056 | UUCUCCUUUAAAGU | 3239 | 2713-2733 | A-2901385 | UAGAAACACUUU | 3594 | 2711-2733 |
| | | GUUUCUA | | | | AAAGGAGAAUU | | |
| AD-1571289.1 | A-1146074 | AAAGUGUUUCUUCC | 3240 | 2722-2742 | A-2901387 | UAUUAAGGGAAG | 3595 | 2720-2742 |
| | | CUUAAUA | | | | AAACACUUUAA | | |
| AD-1571290.1 | A-1146584 | UGCACUUUGGCACA | 3241 | 3002-3022 | A-2901388 | UCAATUGUGUGC | 3596 | 3000-3022 |
| | | CAAUUGA | | | | CAAAGUGCACU | | |
| AD-1571291.1 | A-1146636 | GAACAAUCUAAUGU | 3242 | 3028-3048 | A-2901389 | UAACCACACAUU | 3597 | 3026-3048 |
| | | GUGGUUA | | | | AGAUUGUUCUG | | |
| AD-1571292.1 | A-1146650 | CUAAUGUGUGGUUU | 3243 | 3035-3055 | A-2901390 | UAAUACCAAACC | 3598 | 3033-3055 |
| | | GGUAUUA | | | | ACACAUUAGAU | | |
| AD-1571293.1 | A-1146652 | UAAUGUGUGGUUUG | 3244 | 3036-3056 | A-2901391 | UGAATACCAAACC | 3599 | 3034-3056 |
| | | GUAUUCA | | | | ACACAUUAGA | | |

TABLE 14
Knockdown of SNCA in Be(2)C Cells, in vitro.

| Duplex Name | 10 nM | STDEV | 1 nM | STDEV | 0.1 nM | STDEV | 1 nm_Fit |
|---|---|---|---|---|---|---|---|
| AD-1549052.1 | 11.7 | 4.1 | 17.1 | 2.9 | 24.1 | 3.3 | 16.5 |
| AD-1549359.1 | 13.6 | 2.8 | 13.4 | 3.5 | 27.4 | 3.6 | 16.8 |
| AD-1549054.1 | 10.7 | 2.0 | 18.1 | 5.6 | 29.6 | 5.7 | 17.2 |
| AD-1571262.1 | 14.9 | 2.0 | 15.6 | 2.0 | 21.9 | 1.1 | 17.3 |
| AD-1549333.1 | 13.5 | 3.7 | 22.2 | 3.1 | 20.6 | 6.3 | 17.7 |
| AD-1549407.1 | 14.8 | 1.5 | 21.3 | 1.4 | 18.5 | 1.4 | 18.0 |
| AD-1548854.1 | 11.5 | 2.1 | 19.7 | 2.2 | 27.8 | 4.9 | 18.3 |
| AD-1549403.1 | 14.0 | 4.9 | 20.1 | 2.2 | 24.5 | 5.3 | 18.4 |
| AD-1549283.1 | 17.0 | 4.9 | 18.2 | 4.5 | 22.8 | 0.7 | 18.6 |
| AD-1549641.1 | 15.0 | 1.5 | 20.4 | 3.3 | 21.6 | 3.8 | 18.6 |
| AD-1549267.1 | 12.3 | 2.5 | 18.7 | 3.4 | 30.8 | 6.6 | 18.8 |
| AD-1548851.1 | 15.7 | 1.9 | 17.1 | 2.1 | 27.2 | 4.5 | 19.2 |
| AD-1548869.1 | 11.4 | 2.1 | 22.3 | 3.4 | 30.2 | 6.4 | 19.4 |
| AD-1549272.1 | 19.1 | 6.2 | 16.8 | 2.0 | 26.3 | 5.4 | 19.8 |
| AD-1571164.1 | 11.8 | 1.3 | 25.8 | 2.1 | 29.4 | 7.6 | 20.0 |
| AD-1549354.1 | 13.0 | 2.8 | 24.5 | 5.4 | 26.0 | 2.6 | 20.0 |
| AD-1571188.1 | 16.4 | 1.9 | 21.1 | 2.2 | 23.8 | 4.7 | 20.1 |
| AD-1549401.1 | 10.9 | 1.2 | 26.1 | 4.7 | 32.9 | 8.4 | 20.9 |
| AD-1548886.1 | 11.3 | 1.5 | 24.9 | 5.7 | 33.2 | 2.6 | 20.9 |
| AD-1571191.1 | 14.3 | 4.3 | 22.8 | 5.7 | 33.2 | 8.8 | 21.3 |
| AD-1571193.1 | 18.5 | 3.3 | 20.8 | 3.9 | 27.5 | 1.9 | 21.8 |
| AD-1548884.1 | 12.4 | 1.5 | 21.7 | 2.8 | 40.3 | 9.2 | 21.8 |
| AD-1571187.1 | 16.8 | 2.3 | 22.7 | 3.5 | 29.1 | 3.7 | 22.0 |
| AD-1549357.1 | 15.8 | 3.6 | 24.9 | 3.9 | 28.3 | 4.5 | 22.1 |
| AD-1571194.1 | 16.2 | 4.3 | 23.9 | 3.0 | 32.0 | 7.3 | 22.5 |
| AD-1549285.1 | 17.0 | 3.0 | 21.0 | 2.5 | 33.4 | 6.3 | 22.7 |
| AD-1549266.1 | 14.7 | 2.3 | 24.9 | 2.4 | 32.2 | 2.7 | 22.7 |
| AD-1549351.1 | 13.8 | 1.5 | 22.7 | 3.3 | 40.8 | 11.6 | 23.0 |
| AD-1548870.1 | 17.3 | 2.7 | 20.4 | 2.9 | 36.0 | 4.3 | 23.2 |
| AD-1549245.1 | 14.8 | 3.2 | 24.5 | 2.4 | 35.7 | 4.9 | 23.2 |
| AD-1549334.1 | 16.8 | 2.3 | 22.1 | 3.3 | 35.1 | 3.7 | 23.4 |
| AD-1549397.1 | 21.5 | 4.8 | 20.9 | 2.9 | 30.5 | 6.3 | 23.6 |
| AD-1549290.1 | 17.9 | 2.7 | 22.0 | 2.9 | 35.3 | 1.9 | 23.6 |
| AD-1549525.1 | 22.7 | 3.9 | 21.5 | 3.9 | 27.8 | 2.4 | 23.6 |
| AD-1549406.1 | 17.4 | 1.1 | 23.6 | 3.7 | 33.1 | 5.7 | 23.8 |
| AD-1549284.1 | 15.7 | 4.0 | 28.2 | 7.0 | 32.6 | 4.9 | 23.8 |
| AD-1549439.1 | 20.3 | 2.8 | 26.0 | 4.7 | 27.2 | 5.6 | 23.8 |
| AD-1549269.1 | 16.5 | 3.4 | 21.9 | 1.8 | 39.2 | 3.9 | 24.0 |
| AD-1549518.1 | 22.5 | 2.9 | 25.6 | 2.9 | 24.6 | 4.6 | 24.0 |
| AD-1549628.1 | 20.5 | 1.1 | 24.5 | 2.8 | 27.5 | 3.3 | 24.1 |
| AD-1571199.1 | 18.5 | 0.4 | 29.0 | 3.1 | 26.0 | 4.8 | 24.1 |
| AD-1549442.1 | 17.2 | 2.5 | 26.1 | 2.1 | 32.5 | 4.6 | 24.3 |
| AD-1549596.1 | 23.2 | 2.3 | 23.2 | 3.8 | 27.6 | 5.6 | 24.3 |
| AD-1549400.1 | 16.1 | 2.8 | 24.4 | 3.1 | 40.8 | 9.8 | 24.8 |
| AD-1549280.1 | 20.6 | 6.3 | 20.8 | 1.2 | 38.2 | 4.2 | 24.9 |
| AD-1549441.1 | 18.7 | 1.2 | 25.6 | 3.2 | 33.5 | 3.3 | 25.0 |
| AD-1549556.1 | 22.5 | 3.4 | 24.3 | 2.8 | 31.4 | 7.2 | 25.3 |
| AD-1571202.1 | 18.8 | 2.3 | 27.1 | 2.8 | 33.0 | 7.0 | 25.3 |
| AD-1549271.1 | 21.0 | 5.7 | 24.1 | 4.6 | 34.0 | 3.0 | 25.4 |
| AD-1549517.1 | 21.8 | 2.1 | 24.0 | 2.8 | 32.7 | 3.5 | 25.5 |
| AD-1549293.1 | 18.1 | 3.4 | 28.1 | 2.4 | 34.0 | 5.0 | 25.5 |
| AD-1549639.1 | 22.6 | 3.7 | 24.1 | 3.0 | 31.6 | 3.8 | 25.7 |
| AD-1549443.1 | 17.8 | 2.1 | 27.6 | 2.7 | 36.6 | 2.9 | 26.1 |
| AD-1571195.1 | 17.7 | 3.1 | 28.4 | 5.8 | 37.2 | 6.2 | 26.2 |
| AD-1549595.1 | 24.7 | 3.7 | 27.8 | 3.7 | 27.1 | 2.1 | 26.2 |
| AD-1549546.1 | 23.9 | 6.8 | 30.9 | 5.5 | 26.3 | 2.0 | 26.4 |
| AD-1549246.1 | 15.5 | 1.1 | 28.6 | 4.4 | 42.9 | 3.8 | 26.6 |
| AD-1571192.1 | 21.9 | 5.1 | 28.5 | 6.0 | 33.4 | 5.3 | 27.0 |
| AD-1571165.1 | 16.8 | 2.5 | 27.6 | 0.8 | 44.6 | 8.6 | 27.1 |
| AD-1549270.1 | 19.2 | 3.9 | 28.3 | 5.0 | 39.9 | 7.2 | 27.4 |
| AD-1549521.1 | 25.9 | 3.5 | 29.6 | 1.0 | 27.4 | 5.6 | 27.4 |
| AD-1549541.1 | 26.7 | 6.1 | 30.6 | 5.6 | 27.2 | 2.9 | 27.6 |
| AD-1549552.1 | 24.2 | 2.7 | 30.9 | 3.9 | 30.2 | 4.5 | 28.1 |
| AD-1549522.1 | 30.4 | 5.6 | 27.4 | 3.6 | 28.2 | 4.9 | 28.3 |
| AD-1549545.1 | 26.8 | 4.5 | 30.1 | 2.5 | 28.5 | 3.0 | 28.3 |
| AD-1549519.1 | 24.8 | 4.5 | 30.1 | 4.8 | 32.9 | 8.4 | 28.4 |
| AD-1549630.1 | 24.6 | 2.9 | 29.7 | 3.3 | 32.2 | 2.2 | 28.4 |
| AD-1549353.1 | 16.9 | 1.4 | 31.1 | 6.8 | 44.9 | 3.6 | 28.4 |
| AD-1549544.1 | 26.7 | 1.5 | 26.1 | 3.8 | 33.7 | 4.7 | 28.5 |
| AD-1549642.1 | 26.3 | 1.8 | 29.1 | 3.0 | 31.6 | 3.0 | 28.9 |
| AD-1549438.1 | 24.2 | 4.9 | 28.1 | 3.3 | 36.9 | 3.5 | 29.0 |
| AD-1549412.1 | 21.0 | 4.8 | 25.4 | 2.2 | 44.9 | 5.3 | 29.0 |
| AD-1571198.1 | 19.2 | 2.4 | 34.3 | 6.6 | 37.9 | 4.0 | 29.0 |
| AD-1571258.1 | 24.6 | 3.9 | 28.5 | 3.3 | 35.8 | 2.9 | 29.1 |
| AD-1571201.1 | 28.4 | 6.5 | 29.5 | 2.9 | 30.6 | 4.6 | 29.2 |
| AD-1549640.1 | 27.2 | 3.1 | 28.5 | 2.8 | 33.7 | 2.3 | 29.5 |
| AD-1571266.1 | 26.3 | 5.7 | 28.9 | 4.4 | 35.4 | 1.1 | 29.7 |
| AD-1571172.1 | 16.2 | 3.2 | 24.8 | 4.6 | 63.6 | 5.1 | 29.7 |
| AD-1549527.1 | 26.5 | 4.6 | 28.0 | 4.7 | 36.5 | 7.4 | 29.7 |
| AD-1549547.1 | 26.2 | 2.6 | 31.2 | 5.5 | 33.2 | 3.2 | 29.8 |
| AD-1549037.1 | 17.5 | 1.5 | 32.2 | 7.1 | 49.1 | 5.0 | 29.8 |
| AD-1571205.1 | 25.5 | 0.6 | 32.9 | 1.1 | 33.3 | 6.0 | 30.1 |
| AD-1549053.1 | 19.2 | 6.2 | 32.4 | 5.2 | 47.8 | 7.8 | 30.3 |
| AD-1571264.1 | 25.4 | 4.8 | 34.6 | 4.2 | 32.8 | 3.6 | 30.3 |
| AD-1571186.1 | 22.3 | 1.1 | 27.6 | 4.5 | 46.7 | 6.7 | 30.4 |
| AD-1571204.1 | 26.8 | 1.6 | 30.1 | 2.2 | 35.5 | 3.1 | 30.5 |
| AD-1549555.1 | 26.8 | 1.3 | 33.8 | 5.0 | 31.4 | 5.0 | 30.5 |
| AD-1548887.1 | 15.5 | 2.7 | 38.7 | 4.8 | 51.5 | 5.2 | 30.6 |
| AD-1549426.1 | 24.5 | 6.2 | 27.6 | 3.0 | 44.5 | 7.1 | 30.7 |
| AD-1548844.1 | 28.1 | 4.7 | 28.6 | 1.8 | 36.3 | 2.7 | 30.7 |
| AD-1549520.1 | 27.5 | 3.1 | 35.7 | 2.4 | 29.7 | 2.3 | 30.7 |
| AD-1549543.1 | 28.1 | 2.1 | 31.7 | 4.1 | 33.7 | 5.4 | 30.9 |
| AD-1549548.1 | 27.7 | 4.3 | 33.8 | 6.1 | 34.4 | 5.1 | 31.4 |
| AD-1571206.1 | 25.0 | 2.8 | 33.2 | 5.0 | 38.8 | 3.4 | 31.6 |
| AD-1549210.1 | 16.5 | 1.2 | 34.8 | 1.3 | 56.0 | 8.0 | 31.9 |
| AD-1571200.1 | 27.0 | 2.1 | 34.1 | 4.5 | 35.9 | 5.6 | 31.9 |
| AD-1571207.1 | 29.1 | 2.1 | 31.2 | 5.7 | 37.2 | 1.4 | 32.4 |
| AD-1549542.1 | 30.1 | 7.5 | 37.8 | 6.2 | 31.9 | 4.2 | 32.4 |
| AD-1549211.1 | 20.9 | 6.4 | 27.9 | 5.8 | 62.7 | 6.9 | 32.4 |
| AD-1571263.1 | 32.3 | 3.8 | 33.4 | 3.8 | 32.3 | 4.3 | 32.5 |
| AD-1549391.1 | 23.5 | 5.1 | 27.8 | 4.2 | 54.6 | 6.6 | 32.5 |
| AD-1549212.1 | 19.6 | 3.3 | 34.9 | 5.6 | 54.5 | 9.7 | 32.9 |
| AD-1549268.1 | 21.9 | 6.7 | 33.8 | 3.4 | 51.2 | 3.6 | 33.2 |
| AD-1549352.1 | 25.9 | 4.0 | 31.7 | 8.0 | 48.4 | 6.4 | 33.5 |
| AD-1571261.1 | 30.3 | 2.4 | 34.6 | 6.2 | 36.7 | 3.0 | 33.6 |
| AD-1549044.1 | 20.5 | 3.2 | 32.5 | 1.9 | 60.8 | 7.3 | 34.1 |
| AD-1549554.1 | 32.5 | 4.1 | 33.9 | 5.8 | 37.3 | 2.7 | 34.1 |
| AD-1548975.1 | 23.6 | 6.7 | 33.2 | 3.6 | 54.0 | 7.9 | 34.3 |
| AD-1549432.1 | 21.9 | 1.7 | 40.3 | 11.2 | 49.0 | 3.1 | 34.6 |
| AD-1549524.1 | 35.6 | 6.1 | 33.3 | 2.9 | 38.0 | 9.4 | 34.9 |
| AD-1549643.1 | 26.5 | 5.1 | 41.7 | 8.8 | 40.3 | 3.4 | 35.2 |
| AD-1571196.1 | 30.3 | 3.8 | 33.1 | 4.8 | 45.1 | 4.3 | 35.4 |
| AD-1571203.1 | 32.6 | 2.1 | 35.5 | 7.2 | 40.1 | 3.9 | 35.5 |
| AD-1549425.1 | 28.1 | 4.2 | 30.4 | 0.4 | 49.8 | 8.2 | 35.6 |
| AD-1549264.1 | 18.9 | 3.3 | 40.1 | 3.4 | 64.5 | 10.5 | 36.0 |
| AD-1549249.1 | 23.5 | 6.7 | 36.2 | 6.9 | 61.5 | 14.4 | 36.3 |
| AD-1571257.1 | 32.8 | 8.8 | 35.0 | 2.6 | 43.8 | 4.6 | 36.4 |
| AD-1549265.1 | 22.3 | 7.2 | 42.7 | 4.1 | 53.2 | 3.8 | 36.4 |
| AD-1548843.1 | 31.6 | 4.0 | 42.4 | 11.3 | 39.1 | 6.2 | 36.6 |
| AD-1548845.1 | 24.7 | 1.8 | 43.4 | 9.3 | 47.9 | 8.7 | 36.6 |
| AD-1571256.1 | 33.6 | 5.6 | 35.3 | 5.7 | 42.5 | 4.3 | 36.6 |
| AD-1571255.1 | 28.1 | 3.4 | 45.5 | 4.5 | 39.8 | 6.3 | 36.8 |
| AD-1571174.1 | 20.8 | 3.1 | 34.8 | 5.2 | 71.5 | 11.1 | 36.8 |
| AD-1571173.1 | 23.5 | 8.5 | 36.4 | 3.8 | 67.4 | 11.4 | 37.5 |
| AD-1548876.1 | 21.9 | 6.4 | 44.6 | 5.3 | 57.2 | 6.9 | 37.8 |
| AD-1549615.1 | 33.2 | 0.7 | 38.7 | 4.9 | 43.1 | 4.0 | 38.0 |
| AD-1571166.1 | 24.2 | 1.6 | 42.1 | 6.0 | 54.5 | 1.7 | 38.3 |
| AD-1571269.1 | 32.7 | 6.2 | 37.6 | 3.6 | 48.2 | 3.2 | 38.7 |
| AD-1548976.1 | 18.9 | 1.8 | 37.0 | 4.1 | 86.5 | 20.6 | 38.9 |
| AD-1549038.1 | 26.0 | 7.2 | 37.2 | 4.4 | 65.2 | 10.7 | 38.9 |
| AD-1571167.1 | 23.8 | 4.4 | 40.9 | 4.4 | 63.8 | 3.6 | 39.2 |
| AD-1571170.1 | 23.9 | 6.2 | 39.1 | 6.1 | 69.4 | 11.1 | 39.6 |
| AD-1548888.1 | 27.0 | 4.9 | 43.5 | 7.4 | 55.1 | 3.5 | 39.7 |
| AD-1571189.1 | 25.6 | 4.9 | 47.4 | 7.0 | 56.8 | 12.5 | 40.5 |
| AD-1571259.1 | 42.2 | 3.1 | 46.6 | 1.5 | 33.7 | 5.7 | 40.5 |
| AD-1549224.1 | 22.4 | 2.7 | 44.7 | 7.2 | 73.5 | 12.2 | 41.5 |
| AD-1571208.1 | 37.7 | 7.7 | 42.4 | 7.2 | 48.0 | 2.7 | 42.2 |
| AD-1549222.1 | 20.5 | 2.8 | 54.0 | 10.3 | 70.9 | 14.6 | 42.7 |
| AD-1571268.1 | 35.4 | 1.5 | 40.6 | 4.0 | 57.9 | 3.9 | 43.4 |
| AD-1571270.1 | 39.7 | 6.7 | 45.6 | 7.9 | 47.9 | 10.0 | 43.7 |
| AD-1549217.1 | 27.7 | 3.7 | 53.3 | 5.3 | 58.3 | 3.5 | 43.9 |
| AD-1571184.1 | 29.8 | 3.4 | 41.0 | 4.1 | 76.0 | 15.1 | 44.8 |
| AD-1571271.1 | 41.1 | 10.3 | 45.0 | 7.3 | 51.5 | 5.2 | 45.0 |
| AD-1571272.1 | 43.6 | 11.8 | 45.5 | 9.0 | 49.8 | 3.8 | 45.3 |
| AD-1571190.1 | 37.4 | 7.1 | 47.0 | 9.4 | 62.4 | 4.8 | 47.2 |
| AD-1549055.1 | 27.2 | 5.0 | 51.9 | 9.1 | 79.7 | 3.7 | 47.7 |
| AD-1571169.1 | 42.5 | 7.6 | 41.0 | 4.8 | 75.0 | 15.2 | 49.5 |
| AD-1571265.1 | 36.5 | 7.2 | 57.9 | 4.9 | 59.6 | 5.8 | 49.6 |
| AD-1571267.1 | 48.2 | 2.5 | 44.3 | 6.1 | 65.2 | 8.4 | 51.4 |
| AD-1549686.1 | 48.6 | 8.1 | 50.5 | 7.4 | 60.7 | 2.9 | 52.5 |
| AD-1549225.1 | 30.6 | 7.6 | 56.2 | 12.2 | 97.3 | 17.3 | 53.6 |
| AD-1549683.1 | 46.4 | 5.6 | 57.4 | 7.8 | 59.5 | 4.7 | 53.7 |
| AD-1571183.1 | 38.8 | 4.7 | 55.9 | 7.2 | 76.7 | 18.2 | 54.2 |
| AD-1549682.1 | 43.4 | 3.8 | 55.3 | 10.4 | 68.4 | 9.7 | 54.2 |
| AD-1571185.1 | 39.4 | 4.7 | 58.8 | 6.7 | 79.0 | 12.8 | 56.1 |
| AD-1571232.1 | 61.0 | 8.4 | 54.1 | 8.5 | 56.0 | 4.7 | 56.6 |
| AD-1571260.1 | 50.8 | 9.0 | 56.2 | 2.6 | 65.4 | 6.1 | 56.8 |
| AD-1549684.1 | 54.7 | 6.9 | 61.2 | 11.4 | 58.0 | 7.5 | 57.4 |
| AD-1571253.1 | 44.4 | 4.8 | 60.9 | 8.5 | 72.9 | 3.4 | 57.8 |
| AD-1571181.1 | 36.9 | 4.3 | 75.2 | 9.9 | 72.8 | 5.1 | 58.2 |
| AD-1571182.1 | 46.4 | 5.9 | 54.7 | 4.5 | 80.6 | 4.3 | 58.7 |
| AD-1571197.1 | 54.0 | 5.2 | 61.1 | 8.3 | 63.1 | 11.3 | 58.7 |
| AD-1551648.1 | 57.6 | 4.2 | 61.8 | 14.0 | 63.9 | 16.0 | 59.7 |
| AD-1549216.1 | 39.0 | 5.1 | 78.3 | 6.7 | 73.4 | 6.7 | 60.4 |
| AD-1550657.1 | 92.2 | 18.7 | 52.5 | 8.0 | 52.0 | 3.5 | 62.2 |
| AD-1552192.1 | 67.3 | 1.9 | 74.8 | 9.7 | 54.9 | 4.9 | 65.2 |
| AD-1549685.1 | 66.3 | 8.5 | 67.0 | 13.5 | 71.8 | 8.1 | 67.4 |
| AD-1571254.1 | 63.1 | 6.1 | 71.7 | 7.1 | 70.3 | 10.8 | 67.8 |
| AD-1550869.1 | 73.2 | 2.5 | 61.4 | 2.7 | 71.0 | 4.9 | 67.9 |
| AD-1548978.1 | 43.1 | 7.1 | 76.6 | 13.7 | 98.1 | 11.2 | 68.2 |
| AD-1571180.1 | 45.7 | 1.2 | 86.0 | 14.4 | 91.8 | 19.3 | 70.3 |
| AD-1549281.1 | 49.2 | 11.2 | 74.7 | 13.2 | 102.9 | 10.6 | 71.3 |
| AD-1550757.1 | 83.5 | 7.8 | 62.5 | 8.0 | 73.3 | 5.2 | 72.1 |
| AD-1550958.1 | 69.4 | 5.3 | 66.0 | 4.7 | 82.5 | 5.3 | 72.6 |
| AD-1551177.1 | 81.3 | 7.1 | 66.8 | 4.4 | 76.5 | 9.0 | 74.4 |
| AD-1550755.1 | 77.4 | 1.8 | 77.8 | 18.1 | 75.8 | 9.7 | 75.9 |
| AD-1550756.1 | 79.2 | 7.7 | 82.4 | 5.1 | 67.7 | 9.5 | 76.0 |
| AD-1551665.1 | 94.1 | 11.4 | 66.5 | 13.7 | 79.0 | 19.0 | 76.8 |
| AD-1551069.1 | 88.7 | 4.6 | 66.6 | 7.8 | 79.3 | 11.6 | 77.3 |
| AD-1551656.1 | 72.6 | 11.0 | 64.4 | 4.9 | 99.5 | 24.7 | 77.6 |
| AD-1571289.1 | 71.1 | 10.4 | 84.4 | 4.2 | 80.2 | 11.0 | 77.7 |
| AD-1550758.1 | 89.8 | 6.8 | 56.4 | 7.9 | 87.7 | 7.2 | 78.0 |
| AD-1549728.1 | 66.2 | 11.4 | 85.9 | 8.5 | 86.2 | 12.1 | 78.0 |
| AD-1551649.1 | 89.2 | 21.9 | 78.8 | 6.7 | 70.9 | 6.6 | 78.3 |
| AD-1551067.1 | 81.7 | 8.0 | 77.7 | 10.8 | 78.9 | 4.7 | 79.0 |
| AD-1551651.1 | 71.9 | 6.2 | 81.1 | 11.0 | 86.5 | 9.5 | 79.0 |
| AD-1571287.1 | 64.1 | 19.0 | 80.1 | 7.3 | 105.6 | 16.5 | 79.7 |
| AD-1551661.1 | 72.3 | 6.1 | 81.1 | 16.0 | 88.9 | 3.2 | 79.7 |
| AD-1551181.1 | 78.6 | 5.8 | 80.4 | 6.9 | 82.4 | 7.0 | 80.2 |
| AD-1551655.1 | 81.8 | 10.9 | 73.0 | 13.8 | 89.5 | 7.9 | 80.2 |
| AD-1571178.1 | 65.6 | 7.6 | 93.8 | 11.1 | 86.7 | 17.6 | 80.2 |
| AD-1552054.1 | 96.9 | 18.8 | 93.5 | 24.6 | 61.0 | 7.2 | 80.9 |
| AD-1549726.1 | 65.7 | 5.6 | 96.6 | 21.3 | 84.5 | 10.1 | 80.9 |
| AD-1571220.1 | 81.0 | 16.3 | 79.2 | 6.3 | 87.4 | 16.0 | 81.4 |
| AD-1571179.1 | 57.1 | 1.6 | 97.0 | 8.8 | 96.7 | 17.9 | 81.5 |
| AD-1551588.1 | 95.8 | 23.0 | 81.1 | 9.2 | 74.7 | 15.2 | 81.8 |
| AD-1551657.1 | 80.8 | 15.9 | 74.9 | 15.6 | 96.0 | 5.6 | 82.1 |
| AD-1552053.1 | 74.5 | 15.1 | 92.0 | 22.1 | 85.1 | 5.5 | 82.2 |
| AD-1549727.1 | 79.2 | 16.0 | 96.5 | 15.5 | 76.4 | 12.8 | 82.2 |
| AD-1552249.1 | 73.9 | 8.8 | 87.9 | 13.0 | 88.6 | 6.6 | 82.4 |
| AD-1551070.1 | 88.6 | 8.4 | 81.8 | 8.1 | 82.1 | 6.8 | 83.8 |
| AD-1550964.1 | 85.4 | 8.0 | 78.1 | 2.6 | 88.6 | 5.6 | 83.8 |
| AD-1571293.1 | 67.0 | 10.4 | 87.8 | 6.0 | 103.0 | 16.2 | 83.8 |
| AD-1550887.1 | 97.5 | 5.1 | 84.2 | 7.8 | 74.4 | 10.4 | 84.5 |
| AD-1551666.1 | 86.6 | 17.9 | 86.0 | 22.6 | 88.5 | 15.3 | 84.7 |
| AD-1571209.1 | 71.6 | 6.4 | 92.0 | 9.0 | 94.1 | 10.6 | 85.0 |
| AD-1551086.1 | 87.1 | 18.1 | 88.8 | 15.6 | 83.6 | 4.2 | 85.4 |
| AD-1571215.1 | 89.9 | 11.3 | 94.1 | 8.4 | 75.9 | 14.0 | 85.5 |
| AD-1571290.1 | 73.8 | 19.8 | 90.2 | 10.2 | 98.5 | 5.2 | 85.7 |
| AD-1571175.1 | 78.4 | 7.2 | 104.2 | 13.0 | 78.4 | 5.7 | 85.8 |
| AD-1550956.1 | 87.2 | 8.4 | 88.4 | 15.2 | 85.8 | 11.6 | 86.2 |
| AD-1550659.1 | 82.8 | 11.7 | 83.0 | 13.4 | 96.8 | 6.9 | 86.6 |
| AD-1550871.1 | 89.6 | 5.6 | 86.8 | 8.5 | 85.6 | 12.5 | 86.6 |
| AD-1571280.1 | 84.4 | 17.1 | 86.0 | 5.9 | 95.3 | 21.1 | 86.7 |
| AD-1550656.1 | 94.4 | 7.1 | 82.3 | 1.0 | 84.9 | 10.1 | 86.8 |
| AD-1551347.1 | 88.3 | 14.3 | 99.6 | 17.1 | 77.8 | 11.5 | 87.0 |
| AD-1550959.1 | 78.9 | 3.9 | 90.0 | 7.6 | 93.6 | 9.0 | 87.0 |
| AD-1551658.1 | 80.8 | 4.0 | 94.4 | 15.2 | 88.8 | 7.4 | 87.2 |
| AD-1550954.1 | 84.7 | 8.1 | 100.2 | 7.5 | 80.2 | 11.8 | 87.4 |
| AD-1551171.1 | 82.8 | 7.6 | 90.4 | 13.2 | 93.4 | 13.0 | 88.0 |
| AD-1552191.1 | 80.0 | 14.0 | 86.0 | 9.3 | 102.7 | 4.7 | 88.3 |
| AD-1571283.1 | 47.4 | 4.2 | 119.8 | 18.1 | 117.5 | 8.4 | 88.3 |
| AD-1550960.1 | 77.5 | 8.3 | 104.8 | 8.1 | 87.1 | 10.0 | 88.5 |
| AD-1552253.1 | 86.8 | 5.2 | 83.9 | 7.9 | 96.7 | 13.1 | 88.5 |
| AD-1571224.1 | 92.1 | 16.5 | 84.4 | 17.3 | 94.5 | 16.2 | 88.7 |
| AD-1571222.1 | 103.3 | 9.8 | 86.9 | 8.1 | 79.4 | 9.2 | 89.0 |
| AD-1549729.1 | 82.5 | 5.0 | 97.4 | 5.3 | 89.6 | 14.8 | 89.0 |
| AD-1571282.1 | 55.4 | 16.6 | 113.8 | 19.6 | 116.8 | 14.6 | 89.0 |
| AD-1551078.1 | 91.4 | 15.0 | 84.2 | 7.4 | 93.5 | 5.8 | 89.1 |
| AD-1550660.1 | 91.5 | 14.5 | 94.9 | 6.2 | 83.7 | 6.0 | 89.3 |
| AD-1571238.1 | 87.3 | 4.0 | 86.7 | 8.3 | 97.4 | 15.6 | 89.6 |
| AD-1551650.1 | 90.2 | 25.0 | 100.8 | 4.1 | 85.0 | 10.8 | 90.0 |
| AD-1571242.1 | 87.3 | 12.5 | 83.0 | 15.9 | 103.7 | 6.4 | 90.0 |
| AD-1551253.1 | 94.8 | 17.0 | 94.9 | 6.5 | 82.4 | 1.3 | 90.1 |
| AD-1549282.1 | 72.7 | 20.4 | 101.0 | 26.4 | 108.3 | 11.2 | 90.3 |
| AD-1551180.1 | 95.5 | 9.7 | 88.1 | 4.1 | 89.0 | 7.4 | 90.6 |
| AD-1571244.1 | 87.7 | 11.7 | 85.5 | 27.7 | 111.1 | 30.2 | 90.8 |
| AD-1551667.1 | 87.5 | 12.6 | 92.2 | 13.3 | 97.0 | 18.8 | 91.0 |
| AD-1552066.1 | 88.0 | 7.7 | 94.9 | 16.5 | 92.8 | 11.0 | 91.0 |
| AD-1552065.1 | 90.1 | 19.9 | 88.0 | 12.8 | 101.7 | 25.2 | 91.1 |
| AD-1551255.1 | 97.6 | 4.7 | 82.3 | 5.7 | 95.0 | 8.6 | 91.1 |
| AD-1571229.1 | 93.0 | 13.6 | 85.6 | 7.5 | 96.3 | 3.4 | 91.1 |
| AD-1552251.1 | 90.4 | 8.3 | 94.3 | 12.1 | 90.9 | 11.0 | 91.3 |
| AD-1571251.1 | 90.4 | 8.6 | 87.4 | 4.3 | 97.5 | 6.9 | 91.4 |
| AD-1571221.1 | 84.3 | 12.9 | 101.7 | 7.6 | 91.8 | 10.0 | 91.7 |
| AD-1552169.1 | 100.5 | 22.8 | 89.9 | 17.7 | 89.8 | 3.6 | 91.8 |
| AD-1552244.1 | 94.4 | 16.6 | 90.4 | 5.8 | 92.4 | 4.0 | 91.9 |
| AD-1551066.1 | 92.4 | 7.8 | 97.4 | 8.3 | 87.7 | 3.5 | 92.2 |
| AD-1571211.1 | 82.1 | 9.4 | 104.2 | 15.4 | 94.4 | 16.3 | 92.2 |
| AD-1550292.1 | 99.9 | 15.2 | 86.7 | 7.4 | 91.9 | 4.9 | 92.2 |
| AD-1551090.1 | 85.1 | 12.5 | 91.7 | 12.4 | 103.0 | 8.6 | 92.5 |
| AD-1552052.1 | 97.0 | 24.2 | 88.3 | 4.8 | 96.6 | 8.9 | 92.8 |
| AD-1571233.1 | 105.1 | 16.4 | 90.0 | 17.8 | 88.7 | 16.5 | 92.8 |
| AD-1571228.1 | 99.2 | 11.5 | 90.2 | 9.3 | 91.5 | 6.8 | 93.0 |
| AD-1571243.1 | 96.7 | 17.0 | 93.1 | 16.7 | 93.1 | 10.3 | 93.2 |
| AD-1551091.1 | 106.0 | 9.4 | 86.9 | 6.6 | 90.2 | 8.6 | 93.7 |
| AD-1550888.1 | 103.7 | 6.9 | 103.2 | 8.5 | 77.8 | 17.2 | 93.7 |
| AD-1571247.1 | 89.4 | 9.1 | 89.5 | 10.3 | 105.1 | 12.1 | 93.8 |
| AD-1571176.1 | 67.4 | 12.9 | 102.8 | 8.0 | 120.8 | 11.5 | 94.0 |
| AD-1551566.1 | 102.7 | 8.4 | 107.9 | 18.2 | 81.7 | 19.0 | 94.0 |
| AD-1552161.1 | 94.4 | 17.1 | 105.4 | 5.6 | 85.8 | 8.9 | 94.1 |
| AD-1571279.1 | 84.5 | 16.5 | 108.4 | 26.7 | 98.4 | 16.2 | 94.5 |
| AD-1571210.1 | 90.0 | 14.7 | 97.6 | 17.3 | 100.7 | 12.3 | 94.9 |
| AD-1551258.1 | 100.9 | 13.1 | 90.0 | 4.0 | 96.2 | 4.8 | 95.2 |
| AD-1551659.1 | 81.2 | 8.6 | 108.1 | 16.3 | 101.0 | 10.1 | 95.3 |
| AD-1550963.1 | 92.8 | 12.2 | 99.3 | 10.9 | 98.1 | 21.9 | 95.3 |
| AD-1551670.1 | 112.3 | 16.3 | 82.5 | 20.5 | 102.2 | 30.3 | 95.4 |
| AD-1571236.1 | 94.8 | 7.7 | 100.1 | 16.3 | 93.3 | 7.1 | 95.4 |
| AD-1571246.1 | 92.4 | 2.5 | 98.3 | 7.6 | 96.7 | 9.9 | 95.5 |
| AD-1550661.1 | 91.1 | 11.0 | 105.7 | 11.3 | 93.1 | 12.2 | 95.8 |
| AD-1571214.1 | 97.7 | 3.5 | 97.8 | 6.9 | 93.7 | 16.1 | 95.8 |
| AD-1571218.1 | 83.6 | 9.3 | 116.2 | 18.2 | 92.3 | 8.9 | 95.9 |
| AD-1571252.1 | 91.3 | 14.8 | 103.2 | 17.7 | 96.6 | 7.2 | 96.0 |
| AD-1571168.1 | 84.4 | 14.1 | 91.7 | 14.4 | 119.1 | 22.0 | 96.1 |
| AD-1571213.1 | 89.9 | 15.1 | 106.6 | 12.9 | 95.3 | 12.1 | 96.1 |
| AD-1552193.1 | 88.9 | 10.5 | 98.7 | 13.7 | 104.6 | 14.1 | 96.3 |
| AD-1571286.1 | 94.8 | 10.7 | 100.4 | 2.6 | 95.3 | 10.8 | 96.4 |
| AD-1551073.1 | 103.1 | 11.4 | 99.8 | 9.2 | 88.8 | 10.2 | 96.6 |
| AD-1571177.1 | 90.8 | 11.6 | 119.3 | 28.8 | 86.7 | 9.1 | 96.6 |
| AD-1571240.1 | 91.8 | 10.8 | 102.6 | 14.9 | 101.1 | 21.1 | 97.0 |
| AD-1571216.1 | 113.7 | 8.5 | 98.5 | 17.0 | 83.5 | 8.4 | 97.0 |
| AD-1571241.1 | 102.3 | 12.0 | 89.9 | 7.7 | 102.5 | 9.1 | 97.2 |
| AD-1571231.1 | 99.5 | 15.6 | 90.5 | 9.5 | 105.0 | 14.0 | 97.3 |
| AD-1551346.1 | 115.2 | 7.9 | 88.0 | 5.5 | 91.7 | 9.5 | 97.4 |
| AD-1552247.1 | 108.7 | 23.9 | 88.0 | 16.7 | 102.5 | 12.3 | 97.9 |
| AD-1550957.1 | 91.3 | 9.7 | 109.6 | 4.4 | 95.1 | 10.2 | 97.9 |
| AD-1552248.1 | 106.1 | 8.9 | 96.7 | 13.3 | 94.5 | 14.9 | 98.0 |
| AD-1551590.1 | 94.6 | 14.0 | 100.5 | 6.8 | 101.9 | 18.5 | 98.1 |
| AD-1571225.1 | 102.6 | 21.2 | 101.3 | 8.7 | 93.2 | 7.8 | 98.1 |
| AD-1550984.1 | 92.5 | 7.9 | 96.5 | 10.2 | 108.3 | 10.6 | 98.4 |
| AD-1551653.1 | 99.2 | 7.9 | 94.3 | 5.4 | 103.2 | 6.0 | 98.6 |
| AD-1552257.1 | 94.9 | 4.9 | 97.3 | 9.8 | 104.9 | 5.5 | 98.7 |
| AD-1571171.1 | 85.5 | 5.1 | 107.8 | 9.6 | 105.6 | 8.6 | 98.7 |
| AD-1571237.1 | 102.6 | 7.0 | 111.8 | 2.5 | 85.3 | 11.5 | 98.8 |
| AD-1551646.1 | 110.7 | 15.7 | 96.7 | 12.5 | 95.2 | 21.8 | 99.2 |
| AD-1550647.1 | 94.4 | 9.1 | 110.7 | 12.5 | 96.0 | 9.8 | 99.6 |
| AD-1550949.1 | 109.2 | 16.9 | 105.2 | 17.0 | 88.4 | 7.7 | 99.7 |
| AD-1552255.1 | 109.5 | 6.7 | 102.1 | 11.7 | 90.4 | 10.5 | 99.8 |
| AD-1571273.1 | 99.5 | 8.8 | 97.0 | 10.3 | 105.4 | 11.7 | 100.1 |
| AD-1551668.1 | 104.8 | 6.7 | 93.2 | 8.0 | 105.1 | 15.5 | 100.2 |
| AD-1571235.1 | 112.5 | 20.7 | 94.1 | 14.9 | 99.7 | 18.8 | 100.3 |
| AD-1552250.1 | 91.8 | 9.1 | 106.4 | 3.0 | 104.8 | 10.0 | 100.5 |
| AD-1571281.1 | 90.6 | 7.1 | 103.9 | 7.5 | 109.5 | 8.6 | 100.9 |
| AD-1550955.1 | 117.3 | 6.5 | 95.3 | 9.3 | 94.7 | 17.3 | 101.0 |
| AD-1551256.1 | 118.3 | 18.2 | 96.8 | 11.2 | 92.7 | 13.9 | 101.2 |
| AD-1571223.1 | 98.7 | 15.0 | 114.9 | 16.0 | 93.9 | 4.7 | 101.3 |
| AD-1551170.1 | 100.9 | 6.1 | 97.3 | 12.2 | 108.5 | 6.9 | 101.3 |
| AD-1571292.1 | 94.7 | 11.8 | 105.2 | 23.9 | 108.5 | 9.9 | 101.4 |
| AD-1571248.1 | 96.1 | 16.7 | 97.1 | 8.9 | 114.9 | 12.4 | 101.5 |
| AD-1551076.1 | 109.2 | 11.6 | 98.9 | 14.5 | 99.9 | 13.6 | 101.6 |
| AD-1552055.1 | 109.2 | 5.0 | 110.5 | 3.8 | 87.4 | 8.5 | 101.6 |
| AD-1550965.1 | 104.9 | 6.2 | 102.0 | 5.5 | 101.5 | 17.1 | 102.1 |
| AD-1551589.1 | 97.8 | 14.7 | 95.3 | 11.3 | 116.8 | 12.5 | 102.2 |
| AD-1571226.1 | 118.1 | 19.4 | 94.7 | 5.7 | 99.6 | 14.1 | 102.9 |
| AD-1571217.1 | 107.1 | 12.2 | 108.1 | 11.8 | 97.2 | 15.6 | 103.1 |
| AD-1571291.1 | 92.0 | 12.0 | 112.6 | 18.3 | 109.4 | 14.7 | 103.5 |
| AD-1571219.1 | 106.4 | 6.8 | 100.0 | 12.3 | 111.7 | 27.6 | 104.1 |
| AD-1551077.1 | 115.4 | 14.9 | 106.4 | 8.2 | 93.6 | 7.2 | 104.3 |
| AD-1551182.1 | 121.0 | 15.5 | 95.7 | 5.9 | 100.1 | 7.5 | 104.6 |
| AD-1571278.1 | 95.2 | 3.7 | 103.3 | 11.9 | 117.7 | 8.3 | 104.6 |
| AD-1571230.1 | 118.6 | 9.9 | 98.6 | 9.6 | 99.1 | 5.4 | 104.9 |
| AD-1551254.1 | 112.5 | 16.4 | 103.2 | 13.4 | 101.7 | 4.7 | 105.0 |
| AD-1551353.1 | 107.7 | 4.9 | 100.8 | 11.1 | 108.5 | 9.6 | 105.3 |
| AD-1551672.1 | 108.4 | 11.5 | 101.5 | 10.3 | 110.1 | 12.1 | 105.5 |
| AD-1552056.1 | 113.2 | 5.9 | 102.3 | 10.2 | 102.9 | 5.0 | 105.7 |
| AD-1571249.1 | 103.0 | 7.1 | 104.0 | 10.8 | 111.8 | 4.9 | 105.9 |
| AD-1571212.1 | 103.0 | 6.2 | 113.7 | 8.7 | 107.7 | 19.2 | 106.1 |
| AD-1551068.1 | 113.9 | 13.5 | 110.2 | 7.8 | 98.7 | 15.7 | 106.6 |
| AD-1550459.1 | 112.3 | 11.1 | 121.1 | 13.7 | 91.5 | 8.1 | 107.0 |
| AD-1552158.1 | 95.9 | 9.4 | 111.2 | 8.6 | 117.7 | 10.4 | 107.5 |
| AD-1550658.1 | 99.0 | 14.9 | 113.9 | 12.5 | 113.6 | 16.2 | 107.6 |
| AD-1552057.1 | 123.3 | 25.2 | 104.7 | 10.8 | 100.5 | 8.8 | 107.9 |
| AD-1571245.1 | 108.0 | 23.5 | 116.7 | 15.9 | 107.4 | 31.2 | 108.3 |
| AD-1550648.1 | 111.7 | 16.3 | 109.7 | 15.1 | 110.9 | 28.9 | 108.6 |
| AD-1571274.1 | 105.3 | 23.6 | 109.5 | 20.2 | 118.3 | 26.8 | 108.6 |
| AD-1550961.1 | 108.2 | 17.7 | 110.4 | 11.1 | 112.3 | 20.5 | 108.9 |
| AD-1550458.1 | 114.5 | 6.9 | 123.3 | 31.3 | 97.0 | 15.4 | 109.2 |
| AD-1571227.1 | 106.7 | 12.6 | 111.0 | 6.2 | 119.3 | 16.8 | 111.5 |
| AD-1552067.1 | 101.4 | 5.9 | 111.6 | 12.8 | 124.0 | 10.6 | 111.5 |
| AD-1551592.1 | 108.7 | 19.8 | 112.9 | 8.5 | 119.8 | 14.4 | 112.7 |
| AD-1571275.1 | 99.9 | 6.3 | 121.1 | 14.7 | 119.5 | 13.6 | 112.9 |
| AD-1571285.1 | 111.1 | 12.4 | 126.9 | 17.3 | 107.9 | 9.0 | 114.3 |
| AD-1571250.1 | 105.9 | 7.0 | 130.9 | 10.6 | 108.8 | 9.3 | 115.2 |
| AD-1571276.1 | 111.0 | 2.7 | 117.9 | 10.9 | 119.0 | 13.7 | 115.6 |
| AD-1571234.1 | 126.1 | 14.8 | 106.2 | 9.3 | 120.0 | 21.5 | 116.0 |
| AD-1552254.1 | 120.5 | 5.0 | 118.9 | 9.4 | 112.8 | 12.7 | 117.0 |
| AD-1551251.1 | 130.0 | 16.3 | 113.0 | 16.5 | 116.9 | 17.4 | 118.5 |
| AD-1550346.1 | 108.1 | 12.9 | 132.9 | 27.7 | 119.6 | 17.0 | 119.4 |
| AD-1571239.1 | 114.0 | 23.5 | 113.1 | 10.5 | 135.6 | 21.3 | 119.5 |
| AD-1551164.1 | 124.4 | 6.8 | 126.1 | 9.6 | 118.8 | 12.7 | 122.7 |
| AD-1552159.1 | 116.2 | 6.2 | 131.5 | 12.5 | 129.0 | 3.4 | 125.1 |
| AD-1571277.1 | 124.2 | 3.9 | 125.1 | 21.4 | 131.6 | 19.1 | 125.5 |
| AD-1551392.1 | 126.2 | 10.3 | 129.8 | 19.8 | 126.2 | 11.1 | 126.6 |
| AD-1551257.1 | 130.9 | 11.8 | 131.2 | 19.7 | 123.3 | 6.2 | 127.6 |
| AD-1571284.1 | 131.6 | 24.8 | 135.8 | 7.0 | 129.3 | 10.1 | 130.8 |

| INFORMAL SEQUENCE LISTING | |
|---|---|
| LOCUS NM_007308 3312 bp mRNA linear PRI 31 Aug. 2020 | |
| DEFINITION Homo sapiens synuclein alpha (SNCA), transcript variant 4, | |
| mRNA. VERSION NM_007308.3 | |
| SEQ ID NO: 1 | |
| 1 | ggcgacgacc agaaggggcc caagagaggg ggcgagcgac cgagcgccgc gacgcggaag |
| 61 | tgaggtgcgt gcgggctgca gcgcagaccc cggcccggcc cctccgagag cgtcctgggc |
| 121 | gctccctcac gccttgcctt caagccttct gcctttccac cctcgtgagc ggagaactgg |
| 181 | gagtggccat tcgacgacag gttagcgggt ttgcctccca ctcccccagc ctcgcgtcgc |
| 241 | cggctcacag cggcctcctc tggggacagt cccccccggg tgccgcctcc gcccttcctg |
| 301 | tgcgctcctt ttccttcttc tttcctatta aatattattt gggaattgtt taaatttttt |
| 361 | ttttaaaaaa agagagaggc ggggaggagt cggagttgtg gagaagcaga gggactcagt |
| 421 | gtggtgtaaa ggaattcatt agccatggat gtattcatga aaggactttc aaaggccaag |
| 481 | gagggagttg tggctgctgc tgagaaaacc aaacagggtg tggcagaagc agcaggaaag |
| 541 | acaaaagagg gtgttctcta tgtaggctcc aaaaccaagg agggagtggt gcatggtgtg |
| 601 | gcaacagtgg ctgagaagac caaagagcaa gtgacaaatg ttggaggagc agtggtgacg |
| 661 | ggtgtgacag cagtagccca gaagacagtg gagggagcag ggagcattgc agcagccact |
| 721 | ggctttgtca aaaaggacca gttgggcaag gaagggtatc aagactacga acctgaagcc |
| 781 | taagaaatat ctttgctccc agtttcttga gatctgctga cagatgttcc atcctgtaca |
| 841 | agtgctcagt tccaatgtgc ccagtcatga catttctcaa agtttttaca gtgtatctcg |
| 901 | aagtcttcca tcagcagtga ttgaagtatc tgtacctgcc cccactcagc atttcggtgc |
| 961 | ttccctttca ctgaagtgaa tacatggtag cagggtcttt gtgtgctgtg gattttgtgg |
| 1021 | cttcaatcta cgatgttaaa acaaattaaa aacacctaag tgactaccac ttatttctaa |
| 1081 | atcctcacta tttttttgtt gctgttgttc agaagttgtt agtgatttgc tatcatatat |
| 1141 | tataagattt ttaggtgtct tttaatgata ctgtctaaga ataatgacgt attgtgaaat |
| 1201 | ttgttaatat atataatact taaaaatatg tgagcatgaa actatgcacc tataaatact |
| 1261 | aaatatgaaa ttttaccatt ttgcgatgtg ttttattcac ttgtgtttgt atataaatgg |
| 1321 | tgagaattaa aataaaacgt tatctcattg caaaaatatt ttatttttat cccatctcac |
| 1381 | tttaataata aaaatcatgc ttataagcaa catgaattaa gaactgacac aaaggacaaa |
| 1441 | aatataaagt tattaatagc catttgaaga aggaggaatt ttagaagagg tagagaaaat |
| 1501 | ggaacattaa ccctacactc ggaattccct gaagcaacac tgccagaagt gtgttttggt |
| 1561 | atgcactggt tccttaagtg gctgtgatta attattgaaa gtggggtgtt gaagacccca |
| 1621 | actactattg tagagtggtc tatttctccc ttcaatcctg tcaatgtttg ctttacgtat |
| 1681 | tttggggaac tgttgtttga tgtgtatgtg tttataattg ttatacattt ttaattgagc |
| 1741 | cttttattaa catatattgt tatttttgtc tcgaaataat tttttagtta aaatctattt |
| 1801 | tgtctgatat tggtgtgaat gctgtacctt tctgacaata aataatattc gaccatgaat |
| 1861 | aaaaaaaaaa aaaaagtggg ttcccgggaa ctaagcagtg tagaagatga ttttgactac |
| 1921 | accctcctta gagagccata agacacatta gcacatatta gcacattcaa ggctctgaga |
| 1981 | gaatgtggtt aactttgttt aactcagcat tcctcacttt ttttttttaa tcatcagaaa |
| 2041 | ttctctctct ctctctctct ttttctctcg ctctcttttt tttttttttt ttacaggaaa |
| 2101 | tgcctttaaa catcgttgga actaccagag tcaccttaaa ggagatcaat tctctagact |
| 2161 | gataaaaatt tcatggcctc ctttaaatgt tgccaaatat atgaattcta ggatttttcc |
| 2221 | ttaggaaagg tttttctctt tcagggaaga tctattaact ccccatgggt gctgaaaata |
| 2281 | aacttgatgg tgaaaaactc tgtataaatt aatttaaaaa ttatttggtt tctcttttta |
| 2341 | attattctgg ggcatagtca tttctaaaag tcactagtag aaagtataat ttcaagacag |
| 2401 | aatattctag acatgctagc agtttatatg tattcatgag taatgtgata tatattgggc |
| 2461 | gctggtgagg aaggaaggag gaatgagtga ctataaggat ggttaccata gaaacttcct |
| 2521 | tttttaccta attgaagaga gactactaca gagtgctaag ctgcatgtgt catcttacac |
| 2581 | tagagagaaa tggtaagttt cttgttttat ttaagttatg tttaagcaag gaaaggattt |
| 2641 | gttattgaac agtatatttc aggaaggtta gaaagtggcg gttaggatat attttaaatc |
| 2701 | tacctaaagc agcatatttt aaaaatttaa aagtattggt attaaattaa gaaatagagg |
| 2761 | acagaactag actgatagca gtgacctaga acaatttgag attaggaaag ttgtgaccat |
| 2821 | gaatttaagg atttatgtgg atacaaattc tcctttaaag tgtttcttcc cttaatattt |
| 2881 | atctgacggt aatttttgag cagtgaatta ctttatatat cttaatagtt tatttgggac |
| 2941 | caaacactta aacaaaaagt tctttaagtc atataagcct tttcaggaag cttgtctcat |
| 3001 | attcactccc gagacattca cctgccaagt ggcctgagga tcaatccagt cctaggttta |
| 3061 | ttttgcagac ttacattctc ccaagttatt cagcctcata tgactccacg gtcggcttta |
| 3121 | ccaaaacagt tcagagtgca ctttggcaca caattgggaa cagaacaatc taatgtgtgg |
| 3181 | tttggtattc caagtggggt ctttttcaga atctctgcac tagtgtgaga tgcaaacatg |
| 3241 | tttcctcatc tttctggctt atccagtatg tagctatttg tgacataata aatatataca |
| 3301 | tatatgaaaa ta |
| Reverse complement of SEQ ID NO: 1 | |
| SEQ ID NO: 2 | |
| tattttcatatatgtatatatttattatgtcacaaatagctacatactggataagccagaaagatgagga | |
| aacatgtttgcatctcacactagtgcagagattctgaaaaagaccccacttggaataccaaaccacacat | |
| tagattgttctgttcccaattgtgtgccaaagtgcactctgaactgttttggtaaagccgaccgtggagt | |
| catatgaggctgaataacttgggagaatgtaagtctgcaaaataaacctaggactggattgatcctcagg | |
| ccacttggcaggtgaatgtctcgggagtgaatatgagacaagcttcctgaaaaggcttatatgacttaaa | |
| gaactttttgtttaagtgtttggtcccaaataaactattaagatatataaagtaattcactgctcaaaaa | |
| ttaccgtcagataaatattaagggaagaaacactttaaaggagaatttgtatccacataaatccttaaat | |
| tcatggtcacaactttcctaatctcaaattgttctaggtcactgctatcagtctagttctgtcctctatt | |
| tcttaatttaataccaatacttttaaatttttaaaatatgctgctttaggtagatttaaaatatatccta | |
| accgccactttctaaccttcctgaaatatactgttcaataacaaatcctttccttgcttaaacataactt | |
| aaataaaacaagaaacttaccatttctctctagtgtaagatgacacatgcagcttagcactctgtagtag | |
| tctctcttcaattaggtaaaaaaggaagtttctatggtaaccatccttatagtcactcattcctccttcc | |
| ttcctcaccagcgcccaatatatatcacattactcatgaatacatataaactgctagcatgtctagaata | |
| ttctgtcttgaaattatactttctactagtgacttttagaaatgactatgccccagaataattaaaaaga | |
| gaaaccaaataatttttaaattaatttatacagagtttttcaccatcaagtttattttcagcacccatgg | |
| ggagttaatagatcttccctgaaagagaaaaacctttcctaaggaaaaatcctagaattcatatatttgg | |
| caacatttaaaggaggccatgaaatttttatcagtctagagaattgatctcctttaaggtgactctggta | |
| gttccaacgatgtttaaaggcatttcctgtaaaaaaaaaaaaaaaaagagagcgagagaaaaagagagag | |
| agagagagagaatttctgatgattaaaaaaaaaaagtgaggaatgctgagttaaacaaagttaaccacat | |
| tctctcagagccttgaatgtgctaatatgtgctaatgtgtcttatggctctctaaggagggtgtagtcaa | |
| aatcatcttctacactgcttagttcccgggaacccactttttttttttttttattcatggtcgaatatta | |
| tttattgtcagaaaggtacagcattcacaccaatatcagacaaaatagattttaactaaaaaattatttc | |
| gagacaaaaataacaatatatgttaataaaaggctcaattaaaaatgtataacaattataaacacataca | |
| catcaaacaacagttccccaaaatacgtaaagcaaacattgacaggattgaagggagaaatagaccactc | |
| tacaatagtagttggggtcttcaacaccccactttcaataattaatcacagccacttaaggaaccagtgc | |
| ataccaaaacacacttctggcagtgttgcttcagggaattccgagtgtagggttaatgttccattttctc | |
| tacctcttctaaaattcctccttcttcaaatggctattaataactttatatttttgtcctttgtgtcagt | |
| tcttaattcatgttgcttataagcatgatttttattattaaagtgagatgggataaaaataaaatatttt | |
| tgcaatgagataacgttttattttaattctcaccatttatatacaaacacaagtgaataaaacacatcgc | |
| aaaatggtaaaatttcatatttagtatttataggtgcatagtttcatgctcacatatttttaagtattat | |
| atatattaacaaatttcacaatacgtcattattcttagacagtatcattaaaagacacctaaaaatctta | |
| taatatatgatagcaaatcactaacaacttctgaacaacagcaacaaaaaaatagtgaggatttagaaat | |
| aagtggtagtcacttaggtgtttttaatttgttttaacatcgtagattgaagccacaaaatccacagcac | |
| acaaagaccctgctaccatgtattcacttcagtgaaagggaagcaccgaaatgctgagtgggggcaggta | |
| cagatacttcaatcactgctgatggaagacttcgagatacactgtaaaaactttgagaaatgtcatgact | |
| gggcacattggaactgagcacttgtacaggatggaacatctgtcagcagatctcaagaaactgggagcaa | |
| agatatttcttaggcttcaggttcgtagtcttgatacccttccttgcccaactggtcctttttgacaaag | |
| ccagtggctgctgcaatgctccctgctccctccactgtcttctgggctactgctgtcacacccgtcacca | |
| ctgctcctccaacatttgtcacttgctctttggtcttctcagccactgttgccacaccatgcaccactcc | |
| ctccttggttttggagcctacatagagaacaccctcttttgtctttcctgctgcttctgccacaccctgt | |
| ttggttttctcagcagcagccacaactccctccttggcctttgaaagtcctttcatgaatacatccatgg | |
| ctaatgaattcctttacaccacactgagtccctctgcttctccacaactccgactcctccccgcctctct | |
| ctttttttaaaaaaaaaatttaaacaattcccaaataatatttaataggaaagaagaaggaaaaggagcg | |
| cacaggaagggcggaggcggcacccgggggggactgtccccagaggaggccgctgtgagccggcgacgcg | |
| aggctgggggagtgggaggcaaacccgctaacctgtcgtcgaatggccactcccagttctccgctcacga | |
| gggtggaaaggcagaaggcttgaaggcaaggcgtgagggagcgcccaggacgctctcggaggggccgggc | |
| cggggtctgcgctgcagcccgcacgcacctcacttccgcgtcgcggcgctcggtcgctcgccccctctct | |
| tgggccccttctggtcgtcgcc | |
| LOCUS XM_005555421 2955 bp mRNA linear PRI 25 Jan. 2016 | |
| DEFINITION PREDICTED: Macaca fascicularis synuclein alpha (SNCA), | |
| transcript variant X7, mRNA. | |
| VERSION XM_005555421.2 | |
| SEQ ID NO: 3 | |
| 1 | gccttgcgcg gccaggcagg cggctggaat tggtggttca ccctgcgccc cctgccccat |
| 61 | ccccatccga gatagggaac gaagagcacg ctgcagggaa agcagcgagc gctgggaggg |
| 121 | gagcgtggag aggcgctgac aaatcagcgg tgggggcgga gagccgagga gaaggagaag |
| 181 | gaggaggacg aggaggagga ggacggcgac gaccagaagg ggcccgagag agggggcgag |
| 241 | cgaccgagcg ccgcgacgcg ggagtgagtg tggtgtaaag gaattcatta gccatggatg |
| 301 | tattcatgaa aggactttca aaggccaagg agggagttgt ggctgctgct gagaaaacca |
| 361 | aacagggtgt ggcagaagca gcaggaaaga caaaagaggg tgttctctat gtaggctcca |
| 421 | aaaccaagga gggagtggtg cacggtgtgg caacagtggc tgagaagacc aaagagcaag |
| 481 | tgacaaatgt tggaggagcg gtggtgacgg gtgtgacagc agtagcccag aagacagtgg |
| 541 | agggagcagg gagcattgca gcagccactg gcttcatcaa aaaggaccag ttgggcaaga |
| 601 | atgaagaagg agccccacag gaaggaattc tacaagatat gcctgtggat cctgacaatg |
| 661 | aggcttatga aatgccttct gaggaagggt atcaagacta cgaacctgaa gcctaagaaa |
| 721 | tatctttgct cccagtttct tgagatctgc tgacagacgt tccatcttgt acaagtgctc |
| 781 | agttccaatg tgcccagtca tgacatttct caaagttttt acagtatatt ttgaagtctt |
| 841 | ccatcagcag tgattgaagt atctgtacct gcccccattc agcatttcgg tgcttccctt |
| 901 | tcactgaagt gaatacatgg tagcagggtc tttgtgtgct gtggattttg tggcttcaat |
| 961 | ctatgatgtt aaaacaattt aaaaacacct aagtgactac cacttatttc taaatcctca |
| 1021 | ctattttttt gttgctgttg ttcagaagtt gttagtgatt tgctatcgta tattataaga |
| 1081 | tttttaggtg tcttttaatg atactgtcta agaataatga tgtattgtga aatttgttaa |
| 1141 | tatatataat acttaaaagt atgtgagcat gaaactatgc acctataaat actaactatg |
| 1201 | aaattttacc gttttgtgat gtgttttatt aacttgtgtt tgtatataaa tggtgagaat |
| 1261 | taaaataaaa tgtcgtctca ttgcaaacaa aaatttattt ttatcccatc tcactttaat |
| 1321 | aataaaaatc ttgcttataa gcaacatgca ttgagaactg acacaatgga cataaagtta |
| 1381 | ttaataggca tttgaagaag gaggaatttt agaagaggta gagaaaatgg aacattaacc |
| 1441 | ctacactggg aattccctga agcagcactg ccagaagtgt gttttgtggt gccttaagtg |
| 1501 | gctgtgataa aaaaaaaaaa aagtgggctc cagggaacga agcagtgtaa aagatgattt |
| 1561 | tgactacatc ctccttagag atccatgaga cactttagca catattagca cattcaaggc |
| 1621 | tctgagacaa tgtggttaac ttagtttaac tcagcagtcc ccactaaaaa aaaaaaaatc |
| 1681 | atcaaaaatt ctctctctct attccttttt ctctcgctcc ccttttttcc aggaaatgcc |
| 1741 | tttaaacacc tttgggaact atcaggatca ccttaaagaa gatcagttct ccagactgat |
| 1801 | aaaaatttca tgatctcttt taaatgttgc caaatatatg aattctagga tttttccttg |
| 1861 | ggaaaggttt ttctctttca gggaagatct attaactccc catgggtgct gaaaataaac |
| 1921 | ttgatggtga aaaattctat ataaattaat ttaaaatttt tttggtttct ctttttaatt |
| 1981 | attctggggc atagtcattt ttaaaagtca ctagtagaaa gtataatttc aagacagaat |
| 2041 | attctagaca tgctagcagt ttatatgtat tcatgagtaa tgtgatatat attgggcact |
| 2101 | ggtgaggcag gaaggaggaa tgagtgacta taaggatggt taccatagaa acttcctttt |
| 2161 | ttacctaatt gaaaagcgac tactacagag tgctaagctg catgtgtcat cttacactgg |
| 2221 | agagaaatgg taagtttctt gttttattta agttatgttt aagcaaggaa aggatttttt |
| 2281 | attgaacagt atatttcagg aaggttagaa aatagctgtt aggatatatt ttaaatctac |
| 2341 | ctaaagcagc atattttaaa aaattagaag tattggcatt aaatgaagaa atagaggaca |
| 2401 | aaactagact gacagcaatg acccagaaca ttttgagatt agtaaagttg tgaccatgaa |
| 2461 | tttagggatt tatgtggata caaattctcc tttaaagtgt ttcttccctt aatatttatc |
| 2521 | tggtagttat ttatgagcag tgaattattt tgtagtttat atatcttaat agtttatttg |
| 2581 | ggaccaagca cttaacaaaa agttctataa gtcatagaag ccttttcagg aagcttgtct |
| 2641 | cacattcatt cctgagactt tcacctgcca agtggcctga ggatcaatcc ggtcctaggt |
| 2701 | ttattttgca gacatacatt ctcccaagtt attcagcctc atatgactcc acagtgggct |
| 2761 | ttaccaaaac agttcagagt gcactttggc acacaattgg gagcagaaca atctaatgtg |
| 2821 | tggtttggta ttccaagtgg ggtctttttc agaatctctc cactagtgtg agatgcaaat |
| 2881 | atgtttcctc atttttctgg ctcatccagt atgtagcttt ttgtgacata ataaatatat |
| 2941 | acatatatga aaata |
| Reverse complement of SEQ ID NO: 3 | |
| SEQ ID NO: 4 | |
| tattttcatatatgtatatatttattatgtcacaaaaagctacatactggatgagccagaaaaatgagga | |
| aacatatttgcatctcacactagtggagagattctgaaaaagaccccacttggaataccaaaccacacat | |
| tagattgttctgctcccaattgtgtgccaaagtgcactctgaactgttttggtaaagcccactgtggagt | |
| catatgaggctgaataacttgggagaatgtatgtctgcaaaataaacctaggaccggattgatcctcagg | |
| ccacttggcaggtgaaagtctcaggaatgaatgtgagacaagcttcctgaaaaggcttctatgacttata | |
| gaactttttgttaagtgcttggtcccaaataaactattaagatatataaactacaaaataattcactgct | |
| cataaataactaccagataaatattaagggaagaaacactttaaaggagaatttgtatccacataaatcc | |
| ctaaattcatggtcacaactttactaatctcaaaatgttctgggtcattgctgtcagtctagttttgtcc | |
| tctatttcttcatttaatgccaatacttctaattttttaaaatatgctgctttaggtagatttaaaatat | |
| atcctaacagctattttctaaccttcctgaaatatactgttcaataaaaaatcctttccttgcttaaaca | |
| taacttaaataaaacaagaaacttaccatttctctccagtgtaagatgacacatgcagcttagcactctg | |
| tagtagtcgcttttcaattaggtaaaaaaggaagtttctatggtaaccatccttatagtcactcattcct | |
| ccttcctgcctcaccagtgcccaatatatatcacattactcatgaatacatataaactgctagcatgtct | |
| agaatattctgtcttgaaattatactttctactagtgacttttaaaaatgactatgccccagaataatta | |
| aaaagagaaaccaaaaaaattttaaattaatttatatagaatttttcaccatcaagtttattttcagcac | |
| ccatggggagttaatagatcttccctgaaagagaaaaacctttcccaaggaaaaatcctagaattcatat | |
| atttggcaacatttaaaagagatcatgaaatttttatcagtctggagaactgatcttctttaaggtgatc | |
| ctgatagttcccaaaggtgtttaaaggcatttcctggaaaaaaggggagcgagagaaaaaggaatagaga | |
| gagagaatttttgatgatttttttttttttagtggggactgctgagttaaactaagttaaccacattgtc | |
| tcagagccttgaatgtgctaatatgtgctaaagtgtctcatggatctctaaggaggatgtagtcaaaatc | |
| atcttttacactgcttcgttccctggagcccacttttttttttttttatcacagccacttaaggcaccac | |
| aaaacacacttctggcagtgctgcttcagggaattcccagtgtagggttaatgttccattttctctacct | |
| cttctaaaattcctccttcttcaaatgcctattaataactttatgtccattgtgtcagttctcaatgcat | |
| gttgcttataagcaagatttttattattaaagtgagatgggataaaaataaatttttgtttgcaatgaga | |
| cgacattttattttaattctcaccatttatatacaaacacaagttaataaaacacatcacaaaacggtaa | |
| aatttcatagttagtatttataggtgcatagtttcatgctcacatacttttaagtattatatatattaac | |
| aaatttcacaatacatcattattcttagacagtatcattaaaagacacctaaaaatcttataatatacga | |
| tagcaaatcactaacaacttctgaacaacagcaacaaaaaaatagtgaggatttagaaataagtggtagt | |
| cacttaggtgtttttaaattgttttaacatcatagattgaagccacaaaatccacagcacacaaagaccc | |
| tgctaccatgtattcacttcagtgaaagggaagcaccgaaatgctgaatgggggcaggtacagatacttc | |
| aatcactgctgatggaagacttcaaaatatactgtaaaaactttgagaaatgtcatgactgggcacattg | |
| gaactgagcacttgtacaagatggaacgtctgtcagcagatctcaagaaactgggagcaaagatatttct | |
| taggcttcaggttcgtagtcttgatacccttcctcagaaggcatttcataagcctcattgtcaggatcca | |
| caggcatatcttgtagaattccttcctgtggggctccttcttcattcttgcccaactggtcctttttgat | |
| gaagccagtggctgctgcaatgctccctgctccctccactgtcttctgggctactgctgtcacacccgtc | |
| accaccgctcctccaacatttgtcacttgctctttggtcttctcagccactgttgccacaccgtgcacca | |
| ctccctccttggttttggagcctacatagagaacaccctcttttgtctttcctgctgcttctgccacacc | |
| ctgtttggttttctcagcagcagccacaactccctccttggcctttgaaagtcctttcatgaatacatcc | |
| atggctaatgaattcctttacaccacactcactcccgcgtcgcggcgctcggtcgctcgccccctctctc | |
| gggccccttctggtcgtcgccgtcctcctcctcctcgtcctcctccttctccttctcctcggctctccgc | |
| ccccaccgctgatttgtcagcgcctctccacgctcccctcccagcgctcgctgctttccctgcagcgtgc | |
| tcttcgttccctatctcggatggggatggggcagggggcgcagggtgaaccaccaattccagccgcctgc | |
| ctggccgcgcaaggc | |
| LOCUS NM_009221 1208 bp mRNA linear ROD 6 Sep. 2020 | |
| DEFINITION Mus musculus synuclein, alpha (Snca), transcript variant 2, mRNA. | |
| VERSION NM_009221.2 | |
| SEQ ID NO: 5 | |
| 1 | ggaggagctt ggcactcaaa tccactctgc tataaaacag tggtattctg ctcatctcag |
| 61 | agagaagtgg gaacgtgtta agtaacacag aaattgtctc aaagcctgtg catctatctg |
| 121 | cgcgtgtgct tggattggaa gaagagtctg ttcgctggag ctccacgcag ccagaagtcg |
| 181 | gaaagtgtgg agcaaaaata catctttagc catggatgtg ttcatgaaag gactttcaaa |
| 241 | ggccaaggag ggagttgtgg ctgctgctga gaaaaccaag cagggtgtgg cagaggcagc |
| 301 | tggaaagaca aaagagggag tcctctatgt aggttccaaa actaaggaag gagtggttca |
| 361 | tggagtgaca acagtggctg agaagaccaa agagcaagtg acaaatgttg gaggagcagt |
| 421 | ggtgactggt gtgacagcag tcgctcagaa gacagtggag ggagctggga atatagctgc |
| 481 | tgccactggc tttgtcaaga aggaccagat gggcaagggt gaggaggggt acccacagga |
| 541 | aggaatcctg gaagacatgc ctgtggatcc tggcagtgag gcttatgaaa tgccttcaga |
| 601 | ggaaggctac caagactatg agcctgaagc ctaagaatgt cattgcaccc aatctcctaa |
| 661 | gatctgccgg ctgctcttcc atggcgtaca agtgctcagt tccaatgtgc ccagtcatga |
| 721 | ccttttctca aagctgtaca gtgtgtttca aagtcttcca tcagcagtga tcggcgtcct |
| 781 | gtacctgccc ctcagcatcc cggtgctccc ctctcactac agtgaaaacc tggtagcagg |
| 841 | gtcttgtgtg ctgtggatat tgttgtggct tcacacttaa attgttagaa gaaacttaaa |
| 901 | acacctaagt gactaccact tatttctaaa tcttcatcgt tttctttttg ttgctgttct |
| 961 | taagaagttg tgatttgctc caagagtttt aggtgtcctg aatgactctt tctgtctaag |
| 1021 | aatgatgtgt tgtgaaattt gttaatatat attttaaaat tatgtgagca tgagactatg |
| 1081 | cacctataaa tattaattta tgaattttac agttttgtga tgtgttttat taacttgtgt |
| 1141 | ttgtatataa atggtggaaa ataaaataaa atattatcca ttgcaaaatc aaaaaaaaaa |
| 1201 | aaaaaaaa |
| Reverse complement of SEQ ID NO: 5 | |
| SEQ ID NO: 6 | |
| ttttttttttttttttttgattttgcaatggataatattttattttattttccaccatttatatacaaac | |
| acaagttaataaaacacatcacaaaactgtaaaattcataaattaatatttataggtgcatagtctcatg | |
| ctcacataattttaaaatatatattaacaaatttcacaacacatcattcttagacagaaagagtcattca | |
| ggacacctaaaactcttggagcaaatcacaacttcttaagaacagcaacaaaaagaaaacgatgaagatt | |
| tagaaataagtggtagtcacttaggtgttttaagtttcttctaacaatttaagtgtgaagccacaacaat | |
| atccacagcacacaagaccctgctaccaggttttcactgtagtgagaggggagcaccgggatgctgaggg | |
| gcaggtacaggacgccgatcactgctgatggaagactttgaaacacactgtacagctttgagaaaaggtc | |
| atgactgggcacattggaactgagcacttgtacgccatggaagagcagccggcagatcttaggagattgg | |
| gtgcaatgacattcttaggcttcaggctcatagtcttggtagccttcctctgaaggcatttcataagcct | |
| cactgccaggatccacaggcatgtcttccaggattccttcctgtgggtacccctcctcacccttgcccat | |
| ctggtccttcttgacaaagccagtggcagcagctatattcccagctccctccactgtcttctgagcgact | |
| gctgtcacaccagtcaccactgctcctccaacatttgtcacttgctctttggtcttctcagccactgttg | |
| tcactccatgaaccactccttccttagttttggaacctacatagaggactccctcttttgtctttccagc | |
| tgcctctgccacaccctgcttggttttctcagcagcagccacaactccctccttggcctttgaaagtcct | |
| ttcatgaacacatccatggctaaagatgtatttttgctccacactttccgacttctggctgcgtggagct | |
| ccagcgaacagactcttcttccaatccaagcacacgcgcagatagatgcacaggctttgagacaatttct | |
| gtgttacttaacacgttcccacttctctctgagatgagcagaataccactgttttatagcagagtggatt | |
| tgagtgccaagctcctcc | |
| LOCUS NM_019169 1176 bp mRNA linear ROD 23 Aug. 2020 | |
| DEFINITION Rattus norvegicus synuclein alpha (Snca), mRNA. | |
| VERSION NM_019169.2 | |
| SEQ ID NO: 7 | |
| 1 | ccggcagcag acggcaggag accagcaggt gctccccctg cccttgcccc tcagcccaga |
| 61 | gcctttcacc cctcttgcat tgaaattaga ttggggaaaa caggaggaat cagagttctg |
| 121 | cggaagccta gagagccgtg tggagcaaag atacatcttt agccatggat gtgttcatga |
| 181 | aaggactttc aaaggccaag gagggagttg tggctgctgc tgagaaaacc aagcagggtg |
| 241 | tggcagaggc agctgggaag acaaaagagg gcgtcctcta tgtaggttcc aaaactaagg |
| 301 | agggagtcgt tcatggagtg acaacagtgg ctgagaagac caaagaacaa gtgacaaatg |
| 361 | ttggaggggc agtggtgact ggtgtgacag cagtcgctca gaagacagtg gagggagctg |
| 421 | ggaacattgc tgctgccact ggttttgtca agaaggacca gatgggcaag ggtgaagaag |
| 481 | ggtacccaca agagggaatc ctggaagaca tgcctgtgga ccctagcagt gaggcttatg |
| 541 | aaatgccttc agaggaaggc taccaagact atgagcctga agcctaagaa tgtcgttgta |
| 601 | cccactgtcc taagatctgc ccaggtgttc ttccatggcg tacaagtgct cagttccaac |
| 661 | gtgcccagtc atgacctttt ctcaaagctg tacagtgtat ttcaaagtct tccatcagca |
| 721 | gtgatcggag tcctgtacct gcccctcagc atcccggtgc tcccctctca ctacagtgaa |
| 781 | tacatggtag caggctcttg tgtgctgtgg atattgttgt ggcttcaaac ctaaaatgtt |
| 841 | agaagaaact taaaacacct aagtgactac cacttatttc taactcttca ccgttttttg |
| 901 | ttgctgttct caagaagttg tgatttgcta taagactttt agatgtcctt aatgattctt |
| 961 | tctgtctaag aagaatgatg tgctgtgaaa tttgttaata tatattttaa aatatgtgag |
| 1021 | catgagacta tgcacctata aatattaatt tatgaatttt acagttttgt gacgtgtttt |
| 1081 | attaacttgt gtttgtatat aaatggtgga aattaaaata aaataaaaca ttatctcatt |
| 1141 | gcaaaacctt aaaaaaaaaa aaaaaaaaaa aaaagg |
| Reverse complement of SEQ ID NO: 7 | |
| SEQ ID NO: 8 | |
| ccttttttttttttttttttttttttaaggttttgcaatgagataatgttttattttattttaatttcca | |
| ccatttatatacaaacacaagttaataaaacacgtcacaaaactgtaaaattcataaattaatatttata | |
| ggtgcatagtctcatgctcacatattttaaaatatatattaacaaatttcacagcacatcattcttctta | |
| gacagaaagaatcattaaggacatctaaaagtcttatagcaaatcacaacttcttgagaacagcaacaaa | |
| aaacggtgaagagttagaaataagtggtagtcacttaggtgttttaagtttcttctaacattttaggttt | |
| gaagccacaacaatatccacagcacacaagagcctgctaccatgtattcactgtagtgagaggggagcac | |
| cgggatgctgaggggcaggtacaggactccgatcactgctgatggaagactttgaaatacactgtacagc | |
| tttgagaaaaggtcatgactgggcacgttggaactgagcacttgtacgccatggaagaacacctgggcag | |
| atcttaggacagtgggtacaacgacattcttaggcttcaggctcatagtcttggtagccttcctctgaag | |
| gcatttcataagcctcactgctagggtccacaggcatgtcttccaggattccctcttgtgggtacccttc | |
| ttcacccttgcccatctggtccttcttgacaaaaccagtggcagcagcaatgttcccagctccctccact | |
| gtcttctgagcgactgctgtcacaccagtcaccactgcccctccaacatttgtcacttgttctttggtct | |
| tctcagccactgttgtcactccatgaacgactccctccttagttttggaacctacatagaggacgccctc | |
| ttttgtcttcccagctgcctctgccacaccctgcttggttttctcagcagcagccacaactccctccttg | |
| gcctttgaaagtcctttcatgaacacatccatggctaaagatgtatctttgctccacacggctctctagg | |
| cttccgcagaactctgattcctcctgttttccccaatctaatttcaatgcaagaggggtgaaaggctctg | |
| ggctgaggggcaagggcagggggagcacctgctggtctcctgccgtctgctgccgg | |
| LOCUS XM_535656 1493 bp mRNA linear MAM 6 Jan. 2021 | |
| DEFINITION PREDICTED: Canis lupus familiaris synuclein alpha (SNCA), | |
| transcript variant X12, mRNA. | |
| ACCESSION XM_535656 | |
| VERSION XM_535656.7 | |
| SEQ ID NO: 1806 | |
| 1 | cggcagaggg gcggggagag gcgctgacaa atcagctgcg ggggcggtga gccgaggaga |
| 61 | aggaggagaa agaggaaggg gaggaagacc acgacgactt gcaggggacc cgagagaggg |
| 121 | ggtgagagac cgagcgcggc agcgtggggg tgagtgtggt gtgaacgaat tcattagcca |
| 181 | tggatgtatt catgaaagga ctttcaaagg ccaaggaggg agtcgtggct gctgctgaaa |
| 241 | aaaccaaaca gggtgtggca gaagcagcag gaaagacaaa agagggtgtc ctctatgtag |
| 301 | gctccaaaac caaggaagga gtggttcatg gtgtgacaac agtggctgag aagaccaaag |
| 361 | agcaagtgac aaatgttggt gaggccgtgg tgacaggggt gacagcagta gcacaaaaga |
| 421 | cagtggaggg agcagggagc atcgcagctg ctactggctt tggcaaaaag gatcagttgg |
| 481 | gcaagagtga agaaggaggc ccacaggaag gaattctgga agatatgcct gttgatcctg |
| 541 | acaatgaggc atatgaaatg ccttctgagg aagggtatca agactatgaa cccgaagcct |
| 601 | aagaaatact tttgctccca gtttcttgag acctactgac agatgttcca tcctgtacaa |
| 661 | gtactcagtt ccaaaatgcc cagtcataac attttctcaa aatttttaca gtgtatttta |
| 721 | aactcttcca tcagcagtga ttgaagttat ctgtaccagc ccctactcag catttcagtg |
| 781 | cttccctctc actgaagtga ttatatggta gcagggtcct cccttgtgtg ctgtgtggat |
| 841 | attgtggctt caaatctaaa atgttaaatt aaagcaccta agtgactacc acttatttct |
| 901 | aaatcttcac tatttttttg ttgctgttat tgagaagttg tgatttacta tcatatatta |
| 961 | taagatttct aggtgtcttt taatgattat ttctgtttaa aaaataatga tgtgttgtga |
| 1021 | aatttgttaa tatatacaat acttagaaac atgttagcat gaaactatgc acctataaat |
| 1081 | attaactatg aaattttact gttttgtgat gtgttttatt aatttgtgtt tatatataaa |
| 1141 | tgctgaaaat taaaatgtta tctcattaca aaaatcttat ttttaatccc atctcacttt |
| 1201 | aataataaaa tcatgcttat aacaatatga actgagaact gacacaatta acttaaagct |
| 1261 | cttgacagcc atttgaagga gaaggaattt tagaagaatt aagcagacaa gatggaacat |
| 1321 | taatccttta ctctggaaat tcactgaagc aacactaccc aaagtatcct gacatgcagt |
| 1381 | ggtgtcttaa gaggttatat ggaaaaaaaa aaaaacgggt tccatggaat agtgagttta |
| 1441 | agaaattatt ttgactatgt ctgcttcaaa tattaataaa acatattagc aca |

Reverse complement of SEQ ID NO: 1806
SEQ ID NO: 3600
tgtgctaatatgttttattaatatttgaagcagacatagtcaaaataatttcttaaactcactattccat
ggaacccgtttttttttttttccatataacctcttaagacaccactgcatgtcaggatactttgggtagt
gttgcttcagtgaatttccagagtaaaggattaatgttccatcttgtctgcttaattcttctaaaattcc
ttctccttcaaatggctgtcaagagctttaagttaattgtgtcagttctcagttcatattgttataagca
tgattttattattaaagtgagatgggattaaaaataagatttttgtaatgagataacattttaattttca
gcatttatatataaacacaaattaataaaacacatcacaaaacagtaaaatttcatagttaatatttata
ggtgcatagtttcatgctaacatgtttctaagtattgtatatattaacaaatttcacaacacatcattat
tttttaaacagaaataatcattaaaagacacctagaaatcttataatatatgatagtaaatcacaacttc
tcaataacagcaacaaaaaaatagtgaagatttagaaataagtggtagtcacttaggtgctttaatttaa
cattttagatttgaagccacaatatccacacagcacacaagggaggaccctgctaccatataatcacttc
agtgagagggaagcactgaaatgctgagtaggggctggtacagataacttcaatcactgctgatggaaga
gtttaaaatacactgtaaaaattttgagaaaatgttatgactgggcattttggaactgagtacttgtaca
ggatggaacatctgtcagtaggtctcaagaaactgggagcaaaagtatttcttaggcttcgggttcatag
tcttgatacccttcctcagaaggcatttcatatgcctcattgtcaggatcaacaggcatatcttccagaa
ttccttcctgtgggcctccttcttcactcttgcccaactgatcctttttgccaaagccagtagcagctgc
gatgctccctgctccctccactgtcttttgtgctactgctgtcacccctgtcaccacggcctcaccaaca
tttgtcacttgctctttggtcttctcagccactgttgtcacaccatgaaccactccttccttggttttgg
agcctacatagaggacaccctcttttgtctttcctgctgcttctgccacaccctgtttggttttttcagc
agcagccacgactccctccttggcctttgaaagtcctttcatgaatacatccatggctaatgaattcgtt
cacaccacactcacccccacgctgccgcgctcggtctctcaccccctctctcgggtcccctgcaagtcgt
cgtggtcttcctccccttcctctttctcctccttctcctcggctcaccgcccccgcagctgatttgtcag
cgcctctccccgcccctctgccg

### EQUIVALENTS

[0855] Those skilled in the art will recognize or be able to ascertain using no more than routine experimentation, many equivalents to the specific embodiments and methods described herein. Such equivalents are intended to be encompassed by the scope of the following claims.

1. A double stranded ribonucleic acid (dsRNA) agent for inhibiting expression of SNCA, wherein the dsRNA agent comprises a sense strand and an antisense strand forming a double stranded region, wherein the sense strand comprises a nucleotide sequence comprising at least 15 contiguous nucleotides, with 0 or 1 mismatches, of a portion of the nucleotide sequence of SEQ ID NO: 1, or a nucleotide sequence having at least 90% nucleotide sequence identity to a portion of the nucleotide sequence of SEQ ID NO: 1, and the antisense strand comprises a nucleotide sequence comprising at least 15 contiguous nucleotides, with 0 or 1 mismatches, of the corresponding portion of the nucleotide sequence of SEQ ID NO: 2, or a nucleotide sequence having at least 90% nucleotide sequence identity to a portion of the nucleotide sequence of SEQ ID NO: 2.

2. A double stranded ribonucleic acid (RNAi) agent for inhibiting expression of a SNCA gene, wherein the RNAi agent comprises a sense strand and an antisense strand, and wherein the antisense strand comprises a region of complementarity comprising at least 15 contiguous nucleotides differing by no more than 3 nucleotides from an antisense sequence selected from the group consisting of the antisense sequences of Tables 2, 3, 12 and 13.

3. The dsRNA agent of claim 1, wherein the sense strand or the antisense strand is conjugated to one or more lipophilic moieties, optionally wherein one or more lipophilic moieties are conjugated to one or more internal positions on at least one strand, optionally wherein the one or more lipophilic moieties are conjugated to one or more internal positions on at least one strand via a linker or carrier, optionally wherein:
the internal positions include all positions except the terminal two positions from each end of the at least one strand;
the internal positions include all positions except the terminal three positions from each end of the at least one strand;
the internal positions exclude a cleavage site region of the sense strand;
the internal positions include all positions except positions 9-12, counting from the 5′-end of the sense strand;
the internal positions include all positions except positions 11-13, counting from the 3′-end of the sense strand;
the internal positions exclude a cleavage site region of the antisense strand;
the internal positions include all positions except positions 12-14, counting from the 5′-end of the antisense strand; and/or
the internal positions include all positions except positions 11-13 on the sense strand, counting from the 3′-end, and positions 12-14 on the antisense strand, counting from the 5′-end.

4. The dsRNA agent of claim 1, wherein the sense strand comprises a nucleotide sequence comprising at least 17 contiguous nucleotides, with 0 or 1 mismatches, of a portion of the nucleotide sequence of SEQ ID NO: 1, and the antisense strand comprises a nucleotide sequence comprising at least 17 contiguous nucleotides, with 0 or 1 mismatches, of the corresponding portion of the nucleotide sequence of SEQ ID NO: 2, such that the sense strand is complementary to the at least 17 contiguous nucleotides in the antisense strand.

5. The dsRNA agent of claim 1, wherein the sense strand comprises a nucleotide sequence comprising at least 19 contiguous nucleotides, with 0 or 1 mismatches, of a portion of the nucleotide sequence of SEQ ID NO: 1, and the antisense strand comprises a nucleotide sequence comprising at least 19 contiguous nucleotides, with 0 or 1 mismatches, of the corresponding portion of the nucleotide sequence of SEQ ID NO: 2, such that the sense strand is complementary to the at least 19 contiguous nucleotides in the antisense strand.

6. The dsRNA agent of claim 1, wherein the sense strand comprises a nucleotide sequence comprising at least 21 contiguous nucleotides, with 0 or 1 mismatches, of a portion of the nucleotide sequence of SEQ ID NO: 1, and the antisense strand comprises a nucleotide sequence comprising at least 21 contiguous nucleotides, with 0 or 1 mismatches, of the corresponding portion of nucleotide sequence of SEQ ID NO: 2, such that the sense strand is complementary to the at least 21 contiguous nucleotides in the antisense strand.

7. The dsRNA agent of claim 1, wherein the sense strand or the antisense strand is a sense strand or an antisense strand selected from the group consisting of any of the sense strands and antisense strands in any one of Tables 2, 3, 12 and 13.

8. The dsRNA agent of claim 1, wherein both the sense strand and the antisense strand is conjugated to one or more lipophilic moieties.

9. The dsRNA agent of claim 3, wherein the lipophilic moiety is conjugated to one or more positions in the double stranded region of the dsRNA agent, optionally wherein the positions in the double stranded region exclude a cleavage site region of the sense strand.

10. The dsRNA agent of claim 8, wherein the lipophilic moiety is conjugated via a linker or a carrier.

11. The dsRNA agent of claim 8, wherein lipophilicity of the lipophilic moiety, measured by log K_{ow}, exceeds 0.

12. The dsRNA agent of claim 1, wherein the hydrophobicity of the double-stranded RNAi agent, measured by the unbound fraction in a plasma protein binding assay of the double-stranded RNAi agent, exceeds 0.2, optionally wherein the plasma protein binding assay is an electrophoretic mobility shift assay using human serum albumin protein.

13. (canceled)

14. The dsRNA agent of claim 1, wherein the dsRNA agent comprises at least one modified nucleotide.

15. The dsRNA agent of claim 14, wherein no more than five of the sense strand nucleotides and no more than five of the nucleotides of the antisense strand are unmodified nucleotides.

16. The dsRNA agent of claim 14, wherein all of the nucleotides of the sense strand and all of the nucleotides of the antisense strand comprise a modification.

17. The dsRNA agent of claim 1:
wherein at least one of the modified nucleotides is selected from the group a deoxy-nucleotide, a 3′-terminal deoxy-thymine (dT) nucleotide, a 2′-O-methyl modified nucleotide, a 2′-fluoro modified nucleotide, a 2′-deoxy-modified nucleotide, a locked nucleotide, an unlocked nucleotide, a conformationally restricted nucleotide, a constrained ethyl nucleotide, an abasic nucleotide, a 2′-amino-modified nucleotide, a 2′-O-allyl-modified nucleotide, 2′-C-alkyl-modified nucleotide, 2′-hydroxly-modified nucleotide, a 2′-methoxyethyl modified nucleotide, a 2′-O-alkyl-modified nucleotide, a morpholino nucleotide, a phosphoramidate, a non-natural base comprising nucleotide, a tetrahydropyran modified nucleotide, a 1,5-anhydrohexitol modified nucleotide, a cyclohexenyl modified nucleotide, a nucleotide comprising a 5′-phosphorothioate group, a nucleotide comprising a 5′-methylphosphonate group, a nucleotide comprising a 5′ phosphate or 5′ phosphate mimic, a nucleotide comprising vinyl phosphonate, a nucleotide comprising adenosine-glycol nucleic acid (GNA), a nucleotide comprising thymidine-glycol nucleic acid (GNA)S-Isomer, a nucleotide comprising 2-hydroxymethyl-tetrahydrofurane-5-phosphate, a nucleotide comprising 2′-deoxythymidine-3′phosphate, a nucleotide comprising 2′-deoxyguanosine-3′-phosphate, and a terminal nucleotide linked to a cholesteryl derivative and a dodecanoic acid bisdecylamide group; and combinations thereof, optionally:
wherein the modified nucleotide is selected from the group consisting of a 2′-deoxy-2′-fluoro modified nucleotide, a 2′-deoxy-modified nucleotide, 3′-terminal deoxy-thymine nucleotides (dT), a locked nucleotide, an abasic nucleotide, a 2′-amino-modified nucleotide, a 2′-alkyl-modified nucleotide, a morpholino nucleotide, a phosphoramidate, and a non-natural base comprising nucleotide;
wherein the modified nucleotide comprises a short sequence of 3′-terminal deoxy-thymine nucleotides (dT) wherein the modifications on the nucleotides are 2′-O-methyl, GNA and 2′fluoro modifications; and/or
further comprising at least one phosphorothioate internucleotide linkage, optionally wherein the dsRNA agent comprises 6-8 phosphorothioate internucleotide linkages;
wherein each strand is no more than 30 nucleotides in length;
wherein at least one strand comprises a 3′ overhang of at least 1 nucleotide;
wherein at least one strand comprises a 3′ overhang of at least 2 nucleotides;
wherein the double stranded region is 15-30 nucleotide pairs in length, optionally:
wherein the double stranded region is 17-23 nucleotide pairs in length;
wherein the double stranded region is 17-25 nucleotide pairs in length;
wherein the double stranded region is 23-27 nucleotide pairs in length;
wherein the double stranded region is 19-21 nucleotide pairs in length; and/or
wherein the double stranded region is 21-23 nucleotide pairs in length;
wherein each strand has 19-30 nucleotides;
wherein each strand has 19-23 nucleotides;
wherein each strand has 21-23 nucleotides;
wherein one or more lipophilic moieties are conjugated to one or more of the internal positions selected from the group consisting of positions 4-8 and 13-18 on the sense strand, and positions 6-10 and 15-18 on the antisense strand, counting from the 5′end of each strand, optionally wherein the one or more lipophilic moieties are conjugated to one or more of the internal positions selected from the group consisting of positions 5, 6, 7, 15, and 17 on the sense strand, and positions 15 and 17 on the antisense strand, counting from the 5′-end of each strand;
wherein the sense strand is 21 nucleotides in length, the antisense strand is 23 nucleotides in length, and a lipophilic moiety is conjugated to position 21, position 20, position 15, position 1, position 7, position 6, or position 2 of the sense strand or position 16 of the antisense strand, optionally wherein:
the lipophilic moiety is conjugated to position 21, position 20, position 15, position 1, or position 7 of the sense strand;
the lipophilic moiety is conjugated to position 21, position 20, or position 15 of the sense strand;
the lipophilic moiety is conjugated to position 20 or position 15 of the sense strand;
the lipophilic moiety is conjugated to position 16 of the antisense strand; and/or
the lipophilic moiety is an aliphatic, alicyclic, or polyalicyclic compound, optionally wherein the lipophilic moiety is selected from the group consisting of lipid, cholesterol, retinoic acid, cholic acid, adamantane acetic acid, 1-pyrene butyric acid, dihydrotestosterone, 1,3-bis-O(hexadecyl)glycerol, geranyloxyhexyanol, hexadecylglycerol, borneol, menthol, 1,3-propanediol, heptadecyl group, palmitic acid, myristic acid, 03-(oleoyl)lithocholic acid, 03-(oleoyl)cholenic acid, dimethoxytrityl, or phenoxazine, optionally wherein the lipophilic moiety contains a saturated or unsaturated C4-C30 hydrocarbon chain, and an optional functional group selected from the group consisting of hydroxyl, amine, carboxylic acid, sulfonate, phosphate, thiol, azide, and alkyne, optionally wherein the lipophilic moiety contains a saturated or unsaturated C6-C18 hydrocarbon chain, optionally wherein the lipophilic moiety contains a saturated or unsaturated C16 hydrocarbon chain, optionally wherein the saturated or unsaturated C16 hydrocarbon chain is conjugated to position 6, counting from the 5′-end of the strand:
wherein a lipophilic moiety is conjugated via a carrier that replaces one or more nucleotide(s) in the internal position(s) or the double stranded region, optionally wherein the carrier is a cyclic group selected from the group consisting of pyrrolidinyl, pyrazolinyl, pyrazolidinyl, imidazolinyl, imidazolidinyl, piperidinyl, piperazinyl, [1,3]dioxolanyl, oxazolidinyl, isoxazolidinyl, morpholinyl, thiazolidinyl, isothiazolidinyl, quinoxalinyl, pyridazinonyl, tetrahydrofuranyl, and decalinyl; or is an acyclic moiety based on a serinol backbone or a diethanolamine backbone;
wherein a lipophilic moiety is conjugated to the double-stranded iRNA agent via a linker containing an ether, thioether, urea, carbonate, amine, amide, maleimide-thioether, disulfide, phosphodiester, sulfonamide linkage, a product of a click reaction, or carbamate;
wherein a lipophilic moiety is conjugated to a nucleobase, sugar moiety, or internucleosidic linkage;
wherein a lipophilic moiety or a targeting ligand is conjugated via a bio-cleavable linker selected from the group consisting of DNA, RNA, disulfide, amide, functionalized monosaccharides or oligosaccharides of galactosamine, glucosamine, glucose, galactose, mannose, and combinations thereof;
wherein the 3′ end of the sense strand is protected via an end cap which is a cyclic group having an amine, said cyclic group being selected from the group consisting of pyrrolidinyl, pyrazolinyl, pyrazolidinyl, imidazolinyl, imidazolidinyl, piperidinyl, piperazinyl, [1,3]dioxolanyl, oxazolidinyl, isoxazolidinyl, morpholinyl, thiazolidinyl, isothiazolidinyl, quinoxalinyl, pyridazinonyl, tetrahydrofuranyl, and decalinyl;
further comprising a targeting ligand that targets a liver tissue, optionally wherein the targeting ligand is a GalNAc conjugate;
further comprising: a terminal, chiral modification occurring at the first internucleotide linkage at the 3′ end of the antisense strand, having the linkage phosphorus atom in Sp configuration; a terminal, chiral modification occurring at the first internucleotide linkage at the 5′ end of the antisense strand, having the linkage phosphorus atom in Rp configuration; or a terminal, chiral modification occurring at the first internucleotide linkage at the 5′ end of the sense strand, having the linkage phosphorus atom in either Rp configuration or Sp configuration;
further comprising: a terminal, chiral modification occurring at the first and second internucleotide linkages at the 3′ end of the antisense strand, having the linkage phosphorus atom in Sp configuration; a terminal, chiral modification occurring at the first internucleotide linkage at the 5′ end of the antisense strand, having the linkage phosphorus atom in Rp configuration; or a terminal, chiral modification occurring at the first internucleotide linkage at the 5′ end of the sense strand, having the linkage phosphorus atom in either Rp or Sp configuration;
further comprising: a terminal, chiral modification occurring at the first, second and third internucleotide linkages at the 3′ end of the antisense strand, having the linkage phosphorus atom in Sp configuration; a terminal, chiral modification occurring at the first internucleotide linkage at the 5′ end of the antisense strand, having the linkage phosphorus atom in Rp configuration; or a terminal, chiral modification occurring at the first internucleotide linkage at the 5′ end of the sense strand, having the linkage phosphorus atom in either Rp or Sp configuration;
further comprising: a terminal, chiral modification occurring at the first, and second internucleotide linkages at the 3′ end of the antisense strand, having the linkage phosphorus atom in Sp configuration; a terminal, chiral modification occurring at the third internucleotide linkages at the 3′ end of the antisense strand, having the linkage phosphorus atom in Rp configuration; a terminal, chiral modification occurring at the first internucleotide linkage at the 5′ end of the antisense strand, having the linkage phosphorus atom in Rp configuration; or a terminal, chiral modification occurring at the first internucleotide linkage at the 5′ end of the sense strand, having the linkage phosphorus atom in either Rp or Sp configuration;
further comprising: a terminal, chiral modification occurring at the first, and second internucleotide linkages at the 3′ end of the antisense strand, having the linkage phosphorus atom in Sp configuration; a terminal, chiral modification occurring at the first, and second internucleotide linkages at the 5′ end of the antisense strand, having the linkage phosphorus atom in Rp configuration; or a terminal, chiral modification occurring at the first internucleotide linkage at the 5′ end of the sense strand, having the linkage phosphorus atom in either Rp or Sp configuration;
further comprising a phosphate or phosphate mimic at the 5′-end of the antisense strand, optionally wherein the phosphate mimic is a 5′-vinyl phosphonate (VP),
wherein the base pair at the 1 position of the 5′-end of the antisense strand of the duplex is an A:U base pair,
wherein the sense strand has a total of 21 nucleotides and the antisense strand has a total of 23 nucleotides.

18-75. (canceled)

76. A cell containing the dsRNA agent of claim 1;
A pharmaceutical composition for inhibiting expression of a gene encoding SNCA, comprising the dsRNA agent of claim 1; and/or
A pharmaceutical composition comprising the dsRNA agent of any one of claim 1 and a lipid formulation.

77-78. (canceled)

79. A method of inhibiting expression of a SNCA gene in a cell, the method comprising:
(a) contacting the cell with the dsRNA agent of claim 1; and
(b) maintaining the cell produced in step (a) for a time sufficient to obtain degradation of the mRNA transcript of the SNCA gene, thereby inhibiting expression of the SNCA gene in the cell,
A method of treating a subject diagnosed with a SNCA-associated neurodegenerative disease, the method comprising administering to the subject a therapeutically effective amount of the dsRNA agent of claim 1, thereby treating the subject; and/or
A method of preventing development of a SNCA-associated neurodegenerative disease in a subject meeting at least one diagnostic criterion for a SNCA-associated neurodegenerative disease, the method comprising administering to the subject a therapeutically effective amount of the dsRNA agent of claim 1, thereby preventing the development of a SNCA-associated neurodegenerative disease in the subject meeting at least one diagnostic criterion for a SNCA-associated neurodegenerative disease.

80. The method of claim 79:
wherein the cell is within a subject, optionally wherein the subject is a human, meets at least one diagnostic criterion for a SNCA-associated disease and/or has been diagnosed with a SNCA-associated disease, optionally wherein:
the SNCA-associated disease is characterized by one or more symptoms selected from the group consisting of tremors, slowed movement (bradykinesia), rigid muscles, impaired posture and balance, loss of automatic movements, speech changes, writing changes, visual, auditory, olfactory, or tactile hallucinations, poor regulation of body functions (autonomic nervous systems) such as dizziness, falls and bowel issues, cognitive problems such as confusion, poor attention, visual-spatial problems and memory loss, sleep difficulties such as rapid eye movement (REM) sleep behavior disorder (in which dreams are physically acted out while asleep), fluctuating attention including episodes of drowsiness, long periods of staring into space, long naps during the day or disorganized speech, depression, and apathy, orthostatic hypotension (a sudden drop in blood pressure that occurs when a person stands up, causing a person to feel dizzy and lightheaded, and the need to sit, squat, or lie down in order to prevent fainting), clumsiness or incoordination, bladder control problems, contractures (chronic shortening of muscles or tendons around joints, which prevents the joints from moving freely) in the hands or limbs, Pisa syndrome (an abnormal posture in which the body appears to be leaning to one side), antecollis (in which the neck bends forward and the head drops down), and involuntary and uncontrollable sighing or gasping; and/or
the SNCA-associated disease is selected from the group consisting of a synucleinopathy, such as PD, multiple system atrophy, Lewy body dementia (LBD), pure autonomic failure (PAF), Pick's disease, progressive supranuclear palsy, dementia pugilistica, parkinsonism linked to chromosome 17, Lytico-Bodig disease, tangle predominant dementia, Argyrophilic grain disease, ganglioglioma, gangliocytoma, meningioangiomatosis, subacute sclerosing panencephalitis, lead encephalopathy, tuberous sclerosis, Hallervorden-Spatz disease, lipofuscinosis, corticobasal degeneration, frontotemporal dementia, frontotemporal lobar degeneration, Alzheimer's disease, Huntington's disease, Down's syndrome, psychosis, schizophrenia and Creutzfeldt-Jakob disease:
wherein the expression of SNCA is inhibited by at least 50%;
wherein treating comprises amelioration of at least one sign or symptom of the disease;
wherein treating comprises prevention of progression of the disease;
wherein the dsRNA agent is administered to the subject at a dose of about 0.01 mg/kg to about 50 mg/kg;
wherein the dsRNA agent is administered to the subject intrathecally; and/or
further comprising administering to the subject an additional agent or a therapy suitable for treatment or prevention of a SNCA-associated disease or disorder.

81-97. (canceled)

98. A modified double stranded ribonucleic acid (RNAi) agent for inhibiting expression of a SNCA gene as listed in Tables 2, 9, or 12, wherein the 3′-terminus of each sense strand is optionally modified by both (i) removing the 3′-terminal L96 ligand and (ii) replacing the two phosphodiester internucleotide linkages between the three 3′-terminal nucleotides with phosphorothioate internucleotide linkages.

The application's sequence listing, which the Patent Office published only in electronic form, follows.

SEQUENCE LISTING (3611 sequences)

SEQ ID NO: 1 - DNA, 3312 bp, Homo sapiens
ggcgacgaccagaaggggcccaagagagggggcgagcgaccgagcgccgcgacgcggaagtgaggtgcgtgcgggctgcagcgcagaccccggcccggcccctccgagagcgtcctgggcgctccctcacgccttgccttcaagccttctgcctttccaccctcgtgagcggagaactgggagtggccattcgacgacaggttagcgggtttgcctcccactcccccagcctcgcgtcgccggctcacagcggcctcctctggggacagtcccccccgggtgccgcctccgcccttcctgtgcgctccttttccttcttctttcctattaaatattatttgggaattgtttaaattttttttttaaaaaaagagagaggcggggaggagtcggagttgtggagaagcagagggactcagtgtggtgtaaaggaattcattagccatggatgtattcatgaaaggactttcaaaggccaaggagggagttgtggctgctgctgagaaaaccaaacagggtgtggcagaagcagcaggaaagacaaaagagggtgttctctatgtaggctccaaaaccaaggagggagtggtgcatggtgtggcaacagtggctgagaagaccaaagagcaagtgacaaatgttggaggagcagtggtgacgggtgtgacagcagtagcccagaagacagtggagggagcagggagcattgcagcagccactggctttgtcaaaaaggaccagttgggcaaggaagggtatcaagactacgaacctgaagcctaagaaatatctttgctcccagtttcttgagatctgctgacagatgttccatcctgtacaagtgctcagttccaatgtgcccagtcatgacatttctcaaagtttttacagtgtatctcgaagtcttccatcagcagtgattgaagtatctgtacctgcccccactcagcatttcggtgcttccctttcactgaagtgaatacatggtagcagggtctttgtgtgctgtggattttgtggcttcaatctacgatgttaaaacaaattaaaaacacctaagtgactaccacttatttctaaatcctcactatttttttgttgctgttgttcagaagttgttagtgatttgctatcatatattataagatttttaggtgtcttttaatgatactgtctaagaataatgacgtattgtgaaatttgttaatatatataatacttaaaaatatgtgagcatgaaactatgcacctataaatactaaatatgaaattttaccattttgcgatgtgttttattcacttgtgtttgtatataaatggtgagaattaaaataaaacgttatctcattgcaaaaatattttatttttatcccatctcactttaataataaaaatcatgcttataagcaacatgaattaagaactgacacaaaggacaaaaatataaagttattaatagccatttgaagaaggaggaattttagaagaggtagagaaaatggaacattaaccctacactcggaattccctgaagcaacactgccagaagtgtgttttggtatgcactggttccttaagtggctgtgattaattattgaaagtggggtgttgaagaccccaactactattgtagagtggtctatttctcccttcaatcctgtcaatgtttgctttacgtattttggggaactgttgtttgatgtgtatgtgtttataattgttatacatttttaattgagccttttattaacatatattgttatttttgtctcgaaataattttttagttaaaatctattttgtctgatattggtgtgaatgctgtacctttctgacaataaataatattcgaccatgaataaaaaaaaaaaaaaagtgggttcccgggaactaagcagtgtagaagatgattttgactacaccctccttagagagccataagacacattagcacatattagcacattcaaggctctgagagaatgtggttaactttgtttaactcagcattcctcactttttttttttaatcatcagaaattctctctctctctctctctttttctctcgctctctttttttttttttttttacaggaaatgcctttaaacatcgttggaactaccagagtcaccttaaaggagatcaattctctagactgataaaaatttcatggcctcctttaaatgttgccaaatatatgaattctaggatttttccttaggaaaggtttttctctttcagggaagatctattaactccccatgggtgctgaaaataaacttgatggtgaaaaactctgtataaattaatttaaaaattatttggtttctctttttaattattctggggcatagtcatttctaaaagtcactagtagaaagtataatttcaagacagaatattctagacatgctagcagtttatatgtattcatgagtaatgtgatatatattgggcgctggtgaggaaggaaggaggaatgagtgactataaggatggttaccatagaaacttccttttttacctaattgaagagagactactacagagtgctaagctgcatgtgtcatcttacactagagagaaatggtaagtttcttgttttatttaagttatgtttaagcaaggaaaggatttgttattgaacagtatatttcaggaaggttagaaagtggcggttaggatatattttaaatctacctaaagcagcatattttaaaaatttaaaagtattggtattaaattaagaaatagaggacagaactagactgatagcagtgacctagaacaatttgagattaggaaagttgtgaccatgaatttaaggatttatgtggatacaaattctcctttaaagtgtttcttcccttaatatttatctgacggtaatttttgagcagtgaattactttatatatcttaatagtttatttgggaccaaacacttaaacaaaaagttctttaagtcatataagccttttcaggaagcttgtctcatattcactcccgagacattcacctgccaagtggcctgaggatcaatccagtcctaggtttattttgcagacttacattctcccaagttattcagcctcatatgactccacggtcggctttaccaaaacagttcagagtgcactttggcacacaattgggaacagaacaatctaatgtgtggtttggtattccaagtggggtctttttcagaatctctgcactagtgtgagatgcaaacatgtttcctcatctttctggcttatccagtatgtagctatttgtgacataataaatatatacatatatgaaaata

SEQ ID NO: 2 - DNA, 3312 bp, Homo sapiens
tattttcatatatgtatatatttattatgtcacaaatagctacatactggataagccagaaagatgaggaaacatgtttgcatctcacactagtgcagagattctgaaaaagaccccacttggaataccaaaccacacattagattgttctgttcccaattgtgtgccaaagtgcactctgaactgttttggtaaagccgaccgtggagtcatatgaggctgaataacttgggagaatgtaagtctgcaaaataaacctaggactggattgatcctcaggccacttggcaggtgaatgtctcgggagtgaatatgagacaagcttcctgaaaaggcttatatgacttaaagaactttttgtttaagtgtttggtcccaaataaactattaagatatataaagtaattcactgctcaaaaattaccgtcagataaatattaagggaagaaacactttaaaggagaatttgtatccacataaatccttaaattcatggtcacaactttcctaatctcaaattgttctaggtcactgctatcagtctagttctgtcctctatttcttaatttaataccaatacttttaaatttttaaaatatgctgctttaggtagatttaaaatatatcctaaccgccactttctaaccttcctgaaatatactgttcaataacaaatcctttccttgcttaaacataacttaaataaaacaagaaacttaccatttctctctagtgtaagatgacacatgcagcttagcactctgtagtagtctctcttcaattaggtaaaaaaggaagtttctatggtaaccatccttatagtcactcattcctccttccttcctcaccagcgcccaatatatatcacattactcatgaatacatataaactgctagcatgtctagaatattctgtcttgaaattatactttctactagtgacttttagaaatgactatgccccagaataattaaaaagagaaaccaaataatttttaaattaatttatacagagtttttcaccatcaagtttattttcagcacccatggggagttaatagatcttccctgaaagagaaaaacctttcctaaggaaaaatcctagaattcatatatttggcaacatttaaaggaggccatgaaatttttatcagtctagagaattgatctcctttaaggtgactctggtagttccaacgatgtttaaaggcatttcctgtaaaaaaaaaaaaaaaaagagagcgagagaaaaagagagagagagagagagaatttctgatgattaaaaaaaaaaagtgaggaatgctgagttaaacaaagttaaccacattctctcagagccttgaatgtgctaatatgtgctaatgtgtcttatggctctctaaggagggtgtagtcaaaatcatcttctacactgcttagttcccgggaacccactttttttttttttttattcatggtcgaatattatttattgtcagaaaggtacagcattcacaccaatatcagacaaaatagattttaactaaaaaattatttcgagacaaaaataacaatatatgttaataaaaggctcaattaaaaatgtataacaattataaacacatacacatcaaacaacagttccccaaaatacgtaaagcaaacattgacaggattgaagggagaaatagaccactctacaatagtagttggggtcttcaacaccccactttcaataattaatcacagccacttaaggaaccagtgcataccaaaacacacttctggcagtgttgcttcagggaattccgagtgtagggttaatgttccattttctctacctcttctaaaattcctccttcttcaaatggctattaataactttatatttttgtcctttgtgtcagttcttaattcatgttgcttataagcatgatttttattattaaagtgagatgggataaaaataaaatatttttgcaatgagataacgttttattttaattctcaccatttatatacaaacacaagtgaataaaacacatcgcaaaatggtaaaatttcatatttagtatttataggtgcatagtttcatgctcacatatttttaagtattatatatattaacaaatttcacaatacgtcattattcttagacagtatcattaaaagacacctaaaaatcttataatatatgatagcaaatcactaacaacttctgaacaacagcaacaaaaaaatagtgaggatttagaaataagtggtagtcacttaggtgtttttaatttgttttaacatcgtagattgaagccacaaaatccacagcacacaaagaccctgctaccatgtattcacttcagtgaaagggaagcaccgaaatgctgagtgggggcaggtacagatacttcaatcactgctgatggaagacttcgagatacactgtaaaaactttgagaaatgtcatgactgggcacattggaactgagcacttgtacaggatggaacatctgtcagcagatctcaagaaactgggagcaaagatatttcttaggcttcaggttcgtagtcttgatacccttccttgcccaactggtcctttttgacaaagccagtggctgctgcaatgctccctgctccctccactgtcttctgggctactgctgtcacacccgtcaccactgctcctccaacatttgtcacttgctctttggtcttctcagccactgttgccacaccatgcaccactccctccttggttttggagcctacatagagaacaccctcttttgtctttcctgctgcttctgccacaccctgtttggttttctcagcagcagccacaactccctccttggcctttgaaagtcctttcatgaatacatccatggctaatgaattcctttacaccacactgagtccctctgcttctccacaactccgactcctccccgcctctctctttttttaaaaaaaaaatttaaacaattcccaaataatatttaataggaaagaagaaggaaaaggagcgcacaggaagggcggaggcggcacccgggggggactgtccccagaggaggccgctgtgagccggcgacgcgaggctgggggagtgggaggcaaacccgctaacctgtcgtcgaatggccactcccagttctccgctcacgagggtggaaaggcagaaggcttgaaggcaaggcgtgagggagcgcccaggacgctctcggaggggccgggccggggtctgcgctgcagcccgcacgcacctcacttccgcgtcgcggcgctcggtcgctcgccccctctcttgggccccttctggtcgtcgcc

SEQ ID NO: 3 - DNA, 2955 bp, Macaca fascicularis
gccttgcgcggccaggcaggcggctggaattggtggttcaccctgcgccccctgccccatccccatccgagatagggaacgaagagcacgctgcagggaaagcagcgagcgctgggaggggagcgtggagaggcgctgacaaatcagcggtgggggcggagagccgaggagaaggagaaggaggaggacgaggaggaggaggacggcgacgaccagaaggggcccgagagagggggcgagcgaccgagcgccgcgacgcgggagtgagtgtggtgtaaaggaattcattagccatggatgtattcatgaaaggactttcaaaggccaaggagggagttgtggctgctgctgagaaaaccaaacagggtgtggcagaagcagcaggaaagacaaaagagggtgttctctatgtaggctccaaaaccaaggagggagtggtgcacggtgtggcaacagtggctgagaagaccaaagagcaagtgacaaatgttggaggagcggtggtgacgggtgtgacagcagtagcccagaagacagtggagggagcagggagcattgcagcagccactggcttcatcaaaaaggaccagttgggcaagaatgaagaaggagccccacaggaaggaattctacaagatatgcctgtggatcctgacaatgaggcttatgaaatgccttctgaggaagggtatcaagactacgaacctgaagcctaagaaatatctttgctcccagtttcttgagatctgctgacagacgttccatcttgtacaagtgctcagttccaatgtgcccagtcatgacatttctcaaagtttttacagtatattttgaagtcttccatcagcagtgattgaagtatctgtacctgcccccattcagcatttcggtgcttccctttcactgaagtgaatacatggtagcagggtctttgtgtgctgtggattttgtggcttcaatctatgatgttaaaacaatttaaaaacacctaagtgactaccacttatttctaaatcctcactatttttttgttgctgttgttcagaagttgttagtgatttgctatcgtatattataagatttttaggtgtcttttaatgatactgtctaagaataatgatgtattgtgaaatttgttaatatatataatacttaaaagtatgtgagcatgaaactatgcacctataaatactaactatgaaattttaccgttttgtgatgtgttttattaacttgtgtttgtatataaatggtgagaattaaaataaaatgtcgtctcattgcaaacaaaaatttatttttatcccatctcactttaataataaaaatcttgcttataagcaacatgcattgagaactgacacaatggacataaagttattaataggcatttgaagaaggaggaattttagaagaggtagagaaaatggaacattaaccctacactgggaattccctgaagcagcactgccagaagtgtgttttgtggtgccttaagtggctgtgataaaaaaaaaaaaaagtgggctccagggaacgaagcagtgtaaaagatgattttgactacatcctccttagagatccatgagacactttagcacatattagcacattcaaggctctgagacaatgtggttaacttagtttaactcagcagtccccactaaaaaaaaaaaaatcatcaaaaattctctctctctattcctttttctctcgctccccttttttccaggaaatgcctttaaacacctttgggaactatcaggatcaccttaaagaagatcagttctccagactgataaaaatttcatgatctcttttaaatgttgccaaatatatgaattctaggatttttccttgggaaaggtttttctctttcagggaagatctattaactccccatgggtgctgaaaataaacttgatggtgaaaaattctatataaattaatttaaaatttttttggtttctctttttaattattctggggcatagtcatttttaaaagtcactagtagaaagtataatttcaagacagaatattctagacatgctagcagtttatatgtattcatgagtaatgtgatatatattgggcactggtgaggcaggaaggaggaatgagtgactataaggatggttaccatagaaacttccttttttacctaattgaaaagcgactactacagagtgctaagctgcatgtgtcatcttacactggagagaaatggtaagtttcttgttttatttaagttatgtttaagcaaggaaaggattttttattgaacagtatatttcaggaaggttagaaaatagctgttaggatatattttaaatctacctaaagcagcatattttaaaaaattagaagtattggcattaaatgaagaaatagaggacaaaactagactgacagcaatgacccagaacattttgagattagtaaagttgtgaccatgaatttagggatttatgtggatacaaattctcctttaaagtgtttcttcccttaatatttatctggtagttatttatgagcagtgaattattttgtagtttatatatcttaatagtttatttgggaccaagcacttaacaaaaagttctataagtcatagaagccttttcaggaagcttgtctcacattcattcctgagactttcacctgccaagtggcctgaggatcaatccggtcctaggtttattttgcagacatacattctcccaagttattcagcctcatatgactccacagtgggctttaccaaaacagttcagagtgcactttggcacacaattgggagcagaacaatctaatgtgtggtttggtattccaagtggggtctttttcagaatctctccactagtgtgagatgcaaatatgtttcctcatttttctggctcatccagtatgtagctttttgtgacataataaatatatacatatatgaaaata

SEQ ID NO: 4 - DNA, 2955 bp, Macaca fascicularis
tattttcatatatgtatatatttattatgtcacaaaaagctacatactggatgagccagaaaaatgaggaaacatatttgcatctcacactagtggagagattctgaaaaagaccccacttggaataccaaaccacacattagattgttctgctcccaattgtgtgccaaagtgcactctgaactgttttggtaaagcccactgtggagtcatatgaggctgaataacttgggagaatgtatgtctgcaaaataaacctaggaccggattgatcctcaggccacttggcaggtgaaagtctcaggaatgaatgtgagacaagcttcctgaaaaggcttctatgacttatagaactttttgttaagtgcttggtcccaaataaactattaagatatataaactacaaaataattcactgctcataaataactaccagataaatattaagggaagaaacactttaaaggagaatttgtatccacataaatccctaaattcatggtcacaactttactaatctcaaaatgttctgggtcattgctgtcagtctagttttgtcctctatttcttcatttaatgccaatacttctaattttttaaaatatgctgctttaggtagatttaaaatatatcctaacagctattttctaaccttcctgaaatatactgttcaataaaaaatcctttccttgcttaaacataacttaaataaaacaagaaacttaccatttctctccagtgtaagatgacacatgcagcttagcactctgtagtagtcgcttttcaattaggtaaaaaaggaagtttctatggtaaccatccttatagtcactcattcctccttcctgcctcaccagtgcccaatatatatcacattactcatgaatacatataaactgctagcatgtctagaatattctgtcttgaaattatactttctactagtgacttttaaaaatgactatgccccagaataattaaaaagagaaaccaaaaaaattttaaattaatttatatagaatttttcaccatcaagtttattttcagcacccatggggagttaatagatcttccctgaaagagaaaaacctttcccaaggaaaaatcctagaattcatatatttggcaacatttaaaagagatcatgaaatttttatcagtctggagaactgatcttctttaaggtgatcctgatagttcccaaaggtgtttaaaggcatttcctggaaaaaaggggagcgagagaaaaaggaatagagagagagaatttttgatgatttttttttttttagtggggactgctgagttaaactaagttaaccacattgtctcagagccttgaatgtgctaatatgtgctaaagtgtctcatggatctctaaggaggatgtagtcaaaatcatcttttacactgcttcgttccctggagcccacttttttttttttttatcacagccacttaaggcaccacaaaacacacttctggcagtgctgcttcagggaattcccagtgtagggttaatgttccattttctctacctcttctaaaattcctccttcttcaaatgcctattaataactttatgtccattgtgtcagttctcaatgcatgttgcttataagcaagatttttattattaaagtgagatgggataaaaataaatttttgtttgcaatgagacgacattttattttaattctcaccatttatatacaaacacaagttaataaaacacatcacaaaacggtaaaatttcatagttagtatttataggtgcatagtttcatgctcacatacttttaagtattatatatattaacaaatttcacaatacatcattattcttagacagtatcattaaaagacacctaaaaatcttataatatacgatagcaaatcactaacaacttctgaacaacagcaacaaaaaaatagtgaggatttagaaataagtggtagtcacttaggtgtttttaaattgttttaacatcatagattgaagccacaaaatccacagcacacaaagaccctgctaccatgtattcacttcagtgaaagggaagcaccgaaatgctgaatgggggcaggtacagatacttcaatcactgctgatggaagacttcaaaatatactgtaaaaactttgagaaatgtcatgactgggcacattggaactgagcacttgtacaagatggaacgtctgtcagcagatctcaagaaactgggagcaaagatatttcttaggcttcaggttcgtagtcttgatacccttcctcagaaggcatttcataagcctcattgtcaggatccacaggcatatcttgtagaattccttcctgtggggctccttcttcattcttgcccaactggtcctttttgatgaagccagtggctgctgcaatgctccctgctccctccactgtcttctgggctactgctgtcacacccgtcaccaccgctcctccaacatttgtcacttgctctttggtcttctcagccactgttgccacaccgtgcaccactccctccttggttttggagcctacatagagaacaccctcttttgtctttcctgctgcttctgccacaccctgtttggttttctcagcagcagccacaactccctccttggcctttgaaagtcctttcatgaatacatccatggctaatgaattcctttacaccacactcactcccgcgtcgcggcgctcggtcgctcgccccctctctcgggccccttctggtcgtcgccgtcctcctcctcctcgtcctcctccttctccttctcctcggctctccgcccccaccgctgatttgtcagcgcctctccacgctcccctcccagcgctcgctgctttccctgcagcgtgctcttcgttccctatctcggatggggatggggcagggggcgcagggtgaaccaccaattccagccgcctgcctggccgcgcaaggc

SEQ ID NO: 5 - DNA, 1208 bp, Mus musculus
ggaggagcttggcactcaaatccactctgctataaaacagtggtattctgctcatctcagagagaagtgggaacgtgttaagtaacacagaaattgtctcaaagcctgtgcatctatctgcgcgtgtgcttggattggaagaagagtctgttcgctggagctccacgcagccagaagtcggaaagtgtggagcaaaaatacatctttagccatggatgtgttcatgaaaggactttcaaaggccaaggagggagttgtggctgctgctgagaaaaccaagcagggtgtggcagaggcagctggaaagacaaaagagggagtcctctatgtaggttccaaaactaaggaaggagtggttcatggagtgacaacagtggctgagaagaccaaagagcaagtgacaaatgttggaggagcagtggtgactggtgtgacagcagtcgctcagaagacagtggagggagctgggaatatagctgctgccactggctttgtcaagaaggaccagatgggcaagggtgaggaggggtacccacaggaaggaatcctggaagacatgcctgtggatcctggcagtgaggcttatgaaatgccttcagaggaaggctaccaagactatgagcctgaagcctaagaatgtcattgcacccaatctcctaagatctgccggctgctcttccatggcgtacaagtgctcagttccaatgtgcccagtcatgaccttttctcaaagctgtacagtgtgtttcaaagtcttccatcagcagtgatcggcgtcctgtacctgcccctcagcatcccggtgctcccctctcactacagtgaaaacctggtagcagggtcttgtgtgctgtggatattgttgtggcttcacacttaaattgttagaagaaacttaaaacacctaagtgactaccacttatttctaaatcttcatcgttttctttttgttgctgttcttaagaagttgtgatttgctccaagagttttaggtgtcctgaatgactctttctgtctaagaatgatgtgttgtgaaatttgttaatatatattttaaaattatgtgagcatgagactatgcacctataaatattaatttatgaattttacagttttgtgatgtgttttattaacttgtgtttgtatataaatggtggaaaataaaataaaatattatccattgcaaaatcaaaaaaaaaaaaaaaaaa

SEQ ID NO: 6 - DNA, 1208 bp, Mus musculus
ttttttttttttttttttgattttgcaatggataatattttattttattttccaccatttatatacaaacacaagttaataaaacacatcacaaaactgtaaaattcataaattaatatttataggtgcatagtctcatgctcacataattttaaaatatatattaacaaatttcacaacacatcattcttagacagaaagagtcattcaggacacctaaaactcttggagcaaatcacaacttcttaagaacagcaacaaaaagaaaacgatgaagatttagaaataagtggtagtcacttaggtgttttaagtttcttctaacaatttaagtgtgaagccacaacaatatccacagcacacaagaccctgctaccaggttttcactgtagtgagaggggagcaccgggatgctgaggggcaggtacaggacgccgatcactgctgatggaagactttgaaacacactgtacagctttgagaaaaggtcatgactgggcacattggaactgagcacttgtacgccatggaagagcagccggcagatcttaggagattgggtgcaatgacattcttaggcttcaggctcatagtcttggtagccttcctctgaaggcatttcataagcctcactgccaggatccacaggcatgtcttccaggattccttcctgtgggtacccctcctcacccttgcccatctggtccttcttgacaaagccagtggcagcagctatattcccagctccctccactgtcttctgagcgactgctgtcacaccagtcaccactgctcctccaacatttgtcacttgctctttggtcttctcagccactgttgtcactccatgaaccactccttccttagttttggaacctacatagaggactccctcttttgtctttccagctgcctctgccacaccctgcttggttttctcagcagcagccacaactccctccttggcctttgaaagtcctttcatgaacacatccatggctaaagatgtatttttgctccacactttccgacttctggctgcgtggagctccagcgaacagactcttcttccaatccaagcacacgcgcagatagatgcacaggctttgagacaatttctgtgttacttaacacgttcccacttctctctgagatgagcagaataccactgttttatagcagagtggatttgagtgccaagctcctcc

SEQ ID NO: 7 - DNA, 1176 bp, Rattus norvegicus
ccggcagcagacggcaggagaccagcaggtgctccccctgcccttgcccctcagcccagagcctttcacccctcttgcattgaaattagattggggaaaacaggaggaatcagagttctgcggaagcctagagagccgtgtggagcaaagatacatctttagccatggatgtgttcatgaaaggactttcaaaggccaaggagggagttgtggctgctgctgagaaaaccaagcagggtgtggcagaggcagctgggaagacaaaagagggcgtcctctatgtaggttccaaaactaaggagggagtcgttcatggagtgacaacagtggctgagaagaccaaagaacaagtgacaaatgttggaggggcagtggtgactggtgtgacagcagtcgctcagaagacagtggagggagctgggaacattgctgctgccactggttttgtcaagaaggaccagatgggcaagggtgaagaagggtacccacaagagggaatcctggaagacatgcctgtggaccctagcagtgaggcttatgaaatgccttcagaggaaggctaccaagactatgagcctgaagcctaagaatgtcgttgtacccactgtcctaagatctgcccaggtgttcttccatggcgtacaagtgctcagttccaacgtgcccagtcatgaccttttctcaaagctgtacagtgtatttcaaagtcttccatcagcagtgatcggagtcctgtacctgcccctcagcatcccggtgctcccctctcactacagtgaatacatggtagcaggctcttgtgtgctgtggatattgttgtggcttcaaacctaaaatgttagaagaaacttaaaacacctaagtgactaccacttatttctaactcttcaccgttttttgttgctgttctcaagaagttgtgatttgctataagacttttagatgtccttaatgattctttctgtctaagaagaatgatgtgctgtgaaatttgttaatatatattttaaaatatgtgagcatgagactatgcacctataaatattaatttatgaattttacagttttgtgacgtgttttattaacttgtgtttgtatataaatggtggaaattaaaataaaataaaacattatctcattgcaaaaccttaaaaaaaaaaaaaaaaaaaaaaaagg

SEQ ID NO: 8 - DNA, 1176 bp, Rattus norvegicus
ccttttttttttttttttttttttttaaggttttgcaatgagataatgttttattttattttaatttccaccatttatatacaaacacaagttaataaaacacgtcacaaaactgtaaaattcataaattaatatttataggtgcatagtctcatgctcacatattttaaaatatatattaacaaatttcacagcacatcattcttcttagacagaaagaatcattaaggacatctaaaagtcttatagcaaatcacaacttcttgagaacagcaacaaaaaacggtgaagagttagaaataagtggtagtcacttaggtgttttaagtttcttctaacattttaggtttgaagccacaacaatatccacagcacacaagagcctgctaccatgtattcactgtagtgagaggggagcaccgggatgctgaggggcaggtacaggactccgatcactgctgatggaagactttgaaatacactgtacagctttgagaaaaggtcatgactgggcacgttggaactgagcacttgtacgccatggaagaacacctgggcagatcttaggacagtgggtacaacgacattcttaggcttcaggctcatagtcttggtagccttcctctgaaggcatttcataagcctcactgctagggtccacaggcatgtcttccaggattccctcttgtgggtacccttcttcacccttgcccatctggtccttcttgacaaaaccagtggcagcagcaatgttcccagctccctccactgtcttctgagcgactgctgtcacaccagtcaccactgcccctccaacatttgtcacttgttctttggtcttctcagccactgttgtcactccatgaacgactccctccttagttttggaacctacatagaggacgccctcttttgtcttcccagctgcctctgccacaccctgcttggttttctcagcagcagccacaactccctccttggcctttgaaagtcctttcatgaacacatccatggctaaagatgtatctttgctccacacggctctctaggcttccgcagaactctgattcctcctgttttccccaatctaatttcaatgcaagaggggtgaaaggctctgggctgaggggcaagggcagggggagcacctgctggtctcctgccgtctgctgccgg

SEQ ID NO: 9 - protein, 16 aa, Artificial
  Synthetic
AAVALLPAVLLALLAP

SEQ ID NO: 10 - protein, 11 aa, Artificial
  Synthetic
AALLPVLLAAP

SEQ ID NO: 11 - protein, 13 aa, Artificial
  Synthetic
GRKKRRQRRRPPQ

SEQ ID NO: 12 - protein, 16 aa, Artificial
  Synthetic
RQIKIWFQNRRMKWKK

SEQ ID NO: 13 - RNA, 21 nt, Artificial
  Synthetic
gacgacagugugguguaaaga

SEQ ID NO: 14 - RNA, 21 nt, Artificial
  Synthetic
augaaaggacuuucaaaggca

SEQ ID NO: 15 - RNA, 21 nt, Artificial
  Synthetic
aaagaggguguucucuaugua

SEQ ID NO: 16 - RNA, 21 nt, Artificial
  Synthetic
aagaggguguucucuauguaa

SEQ ID NO: 17 - RNA, 21 nt, Artificial
  Synthetic
cucuauguaggcuccaaaaca

SEQ ID NO: 18 - RNA, 21 nt, Artificial
  Synthetic
aagaccaaagagcaagugaca

SEQ ID NO: 19 - RNA, 21 nt, Artificial
  Synthetic
acaaugaggcuuaugaaauga

SEQ ID NO: 20 - RNA, 21 nt, Artificial
  Synthetic
ugaggcuuaugaaaugccuua

SEQ ID NO: 21 - RNA, 21 nt, Artificial
  Synthetic
ggaaggguaucaagacuacga

SEQ ID NO: 22 - RNA, 21 nt, Artificial
  Synthetic
aaggguaucaagacuacgaaa

SEQ ID NO: 23 - RNA, 21 nt, Artificial
  Synthetic
aggguaucaagacuacgaaca

SEQ ID NO: 24 - RNA, 21 nt, Artificial
  Synthetic
ggguaucaagacuacgaacca

SEQ ID NO: 25 - RNA, 21 nt, Artificial
  Synthetic
gguaucaagacuacgaaccua

SEQ ID NO: 26 - RNA, 21 nt, Artificial
  Synthetic
guaucaagacuacgaaccuga

SEQ ID NO: 27 - RNA, 21 nt, Artificial
  Synthetic
uaucaagacuacgaaccugaa

SEQ ID NO: 28 - RNA, 21 nt, Artificial
  Synthetic
ucaagacuacgaaccugaaga

SEQ ID NO: 29 - RNA, 21 nt, Artificial
  Synthetic
gacuacgaaccugaagccuaa

SEQ ID NO: 30 - RNA, 21 nt, Artificial
  Synthetic
aaccugaagccuaagaaauaa

SEQ ID NO: 31 - RNA, 21 nt, Artificial
  Synthetic
cugaagccuaagaaauaucua

SEQ ID NO: 32 - RNA, 21 nt, Artificial
  Synthetic
ugcucccaguuucuugagaua

SEQ ID NO: 33 - RNA, 21 nt, Artificial
  Synthetic
gcucccaguuucuugagauca

SEQ ID NO: 34 - RNA, 21 nt, Artificial
  Synthetic
cucccaguuucuugagaucua

SEQ ID NO: 35 - RNA, 21 nt, Artificial
  Synthetic
ucccaguuucuugagaucuga

SEQ ID NO: 36 - RNA, 21 nt, Artificial
  Synthetic
cccaguuucuugagaucugca

SEQ ID NO: 37 - RNA, 21 nt, Artificial
  Synthetic
aguuucuugagaucugcugaa

SEQ ID NO: 38 - RNA, 21 nt, Artificial
  Synthetic
uuucuugagaucugcugacaa

SEQ ID NO: 39 - RNA, 21 nt, Artificial
  Synthetic
agugcucaguuccaaugugca

SEQ ID NO: 40 - RNA, 21 nt, Artificial
  Synthetic
gugcccagucaugacauuuca

SEQ ID NO: 41 - RNA, 21 nt, Artificial
  Synthetic
ccagucaugacauuucucaaa

SEQ ID NO: 42 - RNA, 21 nt, Artificial
  Synthetic
caucagcagugauugaaguaa

SEQ ID NO: 43 - RNA, 21 nt, Artificial
  Synthetic
uuucacugaagugaauacaua

SEQ ID NO: 44 - RNA, 21 nt, Artificial
  Synthetic
uucacugaagugaauacauga

SEQ ID NO: 45 - RNA, 21 nt, Artificial
  Synthetic
cacugaagugaauacauggua

SEQ ID NO: 46 - RNA, 21 nt, Artificial
  Synthetic
acugaagugaauacaugguaa

SEQ ID NO: 47 - RNA, 21 nt, Artificial
  Synthetic
ugaagugaauacaugguagca

SEQ ID NO: 48 - RNA, 21 nt, Artificial
  Synthetic
gaagugaauacaugguagcaa

SEQ ID NO: 49 - RNA, 21 nt, Artificial
  Synthetic
uggauuuuguggcuucaauca

SEQ ID NO: 50 - RNA, 21 nt, Artificial
  Synthetic
aaaaacaccuaagugacuaca

SEQ ID NO: 51 - RNA, 21 nt, Artificial
  Synthetic
aaaacaccuaagugacuacca

SEQ ID NO: 52 - RNA, 21 nt, Artificial
  Synthetic
aaacaccuaagugacuaccaa

SEQ ID NO: 53 - RNA, 21 nt, Artificial
  Synthetic
accuaagugacuaccacuuaa

SEQ ID NO: 54 - RNA, 21 nt, Artificial
  Synthetic
gugacuaccacuuauuucuaa

SEQ ID NO: 55 - RNA, 21 nt, Artificial
  Synthetic
cuguuguucagaaguuguuaa

SEQ ID NO: 56 - RNA, 21 nt, Artificial
  Synthetic
uguuguucagaaguuguuaga

SEQ ID NO: 57 - RNA, 21 nt, Artificial
  Synthetic
guuguucagaaguuguuagua

SEQ ID NO: 58 - RNA, 21 nt, Artificial
  Synthetic
uucagaaguuguuagugauua

SEQ ID NO: 59 - RNA, 21 nt, Artificial
  Synthetic
aaguuguuagugauuugcuaa

SEQ ID NO: 60 - RNA, 21 nt, Artificial
  Synthetic
uuuuaaugauacugucuaaga

SEQ ID NO: 61 - RNA, 21 nt, Artificial
  Synthetic
auacugucuaagaauaaugaa

SEQ ID NO: 62 - RNA, 21 nt, Artificial
  Synthetic
agcaugaaacuaugcaccuaa

SEQ ID NO: 63 - RNA, 21 nt, Artificial
  Synthetic
caugaaacuaugcaccuauaa

SEQ ID NO: 64 - RNA, 21 nt, Artificial
  Synthetic
uuuaucccaucucacuuuaaa

SEQ ID NO: 65 - RNA, 21 nt, Artificial
  Synthetic
uuaucccaucucacuuuaaua

SEQ ID NO: 66 - RNA, 21 nt, Artificial
  Synthetic
ucccaucucacuuuaauaaua

SEQ ID NO: 67 - RNA, 21 nt, Artificial
  Synthetic
aaaauggaacauuaacccuaa

SEQ ID NO: 68 - RNA, 21 nt, Artificial
  Synthetic
auuagcacauauuagcacaua

SEQ ID NO: 69 - RNA, 21 nt, Artificial
  Synthetic
ucucuuucagggaagaucuaa

SEQ ID NO: 70 - RNA, 21 nt, Artificial
  Synthetic
aagucacuaguagaaaguaua

SEQ ID NO: 71 - RNA, 21 nt, Artificial
  Synthetic
agucacuaguagaaaguauaa

SEQ ID NO: 72 - RNA, 21 nt, Artificial
  Synthetic
cagaauauucuagacaugcua

SEQ ID NO: 73 - RNA, 21 nt, Artificial
  Synthetic
agaauauucuagacaugcuaa

SEQ ID NO: 74 - RNA, 21 nt, Artificial
  Synthetic
gaauauucuagacaugcuaga

SEQ ID NO: 75 - RNA, 21 nt, Artificial
  Synthetic
uagacaugcuagcaguuuaua

SEQ ID NO: 76 - RNA, 21 nt, Artificial
  Synthetic
gaggaaugagugacuauaaga

SEQ ID NO: 77 - RNA, 21 nt, Artificial
  Synthetic
aggaaugagugacuauaagga

SEQ ID NO: 78 - RNA, 21 nt, Artificial
  Synthetic
gagugacuauaaggaugguua

SEQ ID NO: 79 - RNA, 21 nt, Artificial
  Synthetic
acuauaaggaugguuaccaua

SEQ ID NO: 80 - RNA, 21 nt, Artificial
  Synthetic
cuauaaggaugguuaccauaa

SEQ ID NO: 81 - RNA, 21 nt, Artificial
  Synthetic
gaugguuaccauagaaacuua

SEQ ID NO: 82 - RNA, 21 nt, Artificial
  Synthetic
acuacuacagagugcuaagca

SEQ ID NO: 83 - RNA, 21 nt, Artificial
  Synthetic
ugcuaagcugcaugugucaua

SEQ ID NO: 84 - RNA, 21 nt, Artificial
  Synthetic
aagcugcaugugucaucuuaa

SEQ ID NO: 85 - RNA, 21 nt, Artificial
  Synthetic
agcugcaugugucaucuuaca

SEQ ID NO: 86 - RNA, 21 nt, Artificial
  Synthetic
caguauauuucaggaagguua

SEQ ID NO: 87 - RNA, 21 nt, Artificial
  Synthetic
aaaucuaccuaaagcagcaua

SEQ ID NO: 88 - RNA, 21 nt, Artificial
  Synthetic
aguccuagguuuauuuugcaa

SEQ ID NO: 89 - RNA, 21 nt, Artificial
  Synthetic
ccuagguuuauuuugcagaca

SEQ ID NO: 90 - RNA, 21 nt, Artificial
  Synthetic
ccaaguuauucagccucauaa

SEQ ID NO: 91 - RNA, 21 nt, Artificial
  Synthetic
guuauucagccucauaugaca

SEQ ID NO: 92 - RNA, 21 nt, Artificial
  Synthetic
uuauucagccucauaugacua

SEQ ID NO: 93 - RNA, 21 nt, Artificial
  Synthetic
uauucagccucauaugacuca

SEQ ID NO: 94 - RNA, 21 nt, Artificial
  Synthetic
ucggcuuuaccaaaacaguua

SEQ ID NO: 95 - RNA, 21 nt, Artificial
  Synthetic
ggcuuuaccaaaacaguucaa

SEQ ID NO: 96 - RNA, 21 nt, Artificial
  Synthetic
aaacaguucagagugcacuua

SEQ ID NO: 97 - RNA, 21 nt, Artificial
  Synthetic
agagugcacuuuggcacacaa

SEQ ID NO: 98 - RNA, 21 nt, Artificial
  Synthetic
aacagaacaaucuaaugugua

SEQ ID NO: 99 - RNA, 21 nt, Artificial
  Synthetic
cagaacaaucuaaugugugga

SEQ ID NO: 100 - RNA, 21 nt, Artificial
  Synthetic
uaaugugugguuugguauuca

SEQ ID NO: 101 - RNA, 21 nt, Artificial
  Synthetic
gugugguuugguauuccaaga

SEQ ID NO: 102 - RNA, 21 nt, Artificial
  Synthetic
ugugguuugguauuccaagua

SEQ ID NO: 103 - RNA, 23 nt, Artificial
  Synthetic
ucuuuacaccacacugucgucga

SEQ ID NO: 104 - DNA, 23 bp, Artificial
  Synthetic
ugccuutgaaaguccuuucauga

SEQ ID NO: 105 - RNA, 23 nt, Artificial
  Synthetic
uacauagagaacacccucuuuug

SEQ ID NO: 106 - RNA, 23 nt, Artificial
  Synthetic
uuacauagagaacacccucuuuu

SEQ ID NO: 107 - RNA, 23 nt, Artificial
  Synthetic
uguuuuggagccuacauagagaa

SEQ ID NO: 108 - DNA, 23 bp, Artificial
  Synthetic
ugucactugcucuuuggucuucu

SEQ ID NO: 109 - RNA, 23 nt, Artificial
  Synthetic
ucauuucauaagccucauuguca

SEQ ID NO: 110 - RNA, 23 nt, Artificial
  Synthetic
uaaggcauuucauaagccucauu

SEQ ID NO: 111 - DNA, 23 bp, Artificial
  Synthetic
ucguagtcuugauacccuuccuc

SEQ ID NO: 112 - RNA, 23 nt, Artificial
  Synthetic
uuucguagucuugauacccuucc

SEQ ID NO: 113 - DNA, 23 bp, Artificial
  Synthetic
uguucgtagucuugauacccuuc

SEQ ID NO: 114 - RNA, 23 nt, Artificial
  Synthetic
ugguucguagucuugauacccuu

SEQ ID NO: 115 - RNA, 23 nt, Artificial
  Synthetic
uagguucguagucuugauacccu

SEQ ID NO: 116 - DNA, 23 bp, Artificial
  Synthetic
ucaggutcguagucuugauaccc

SEQ ID NO: 117 - DNA, 23 bp, Artificial
  Synthetic
uucaggtucguagucuugauacc

SEQ ID NO: 118 - RNA, 23 nt, Artificial
  Synthetic
ucuucagguucguagucuugaua

SEQ ID NO: 119 - DNA, 23 bp, Artificial
  Synthetic
uuaggctucagguucguagucuu

SEQ ID NO: 120 - RNA, 23 nt, Artificial
  Synthetic
uuauuucuuaggcuucagguucg

SEQ ID NO: 121 - DNA, 23 bp, Artificial
  Synthetic
uagauatuucuuaggcuucaggu

SEQ ID NO: 122 - RNA, 23 nt, Artificial
  Synthetic
uaucucaagaaacugggagcaaa

SEQ ID NO: 123 - RNA, 23 nt, Artificial
  Synthetic
ugaucucaagaaacugggagcaa

SEQ ID NO: 124 - DNA, 23 bp, Artificial
  Synthetic
uagauctcaagaaacugggagca

SEQ ID NO: 125 - RNA, 23 nt, Artificial
  Synthetic
ucagaucucaagaaacugggagc

SEQ ID NO: 126 - DNA, 23 bp, Artificial
  Synthetic
ugcagatcucaagaaacugggag

SEQ ID NO: 127 - RNA, 23 nt, Artificial
  Synthetic
uucagcagaucucaagaaacugg

SEQ ID NO: 128 - RNA, 23 nt, Artificial
  Synthetic
uugucagcagaucucaagaaacu

SEQ ID NO: 129 - DNA, 23 bp, Artificial
  Synthetic
ugcacatuggaacugagcacuug

SEQ ID NO: 130 - RNA, 23 nt, Artificial
  Synthetic
ugaaaugucaugacugggcacau

SEQ ID NO: 131 - RNA, 23 nt, Artificial
  Synthetic
uuugagaaaugucaugacugggc

SEQ ID NO: 132 - RNA, 23 nt, Artificial
  Synthetic
uuacuucaaucacugcugaugga

SEQ ID NO: 133 - DNA, 23 bp, Artificial
  Synthetic
uauguatucacuucagugaaagg

SEQ ID NO: 134 - RNA, 23 nt, Artificial
  Synthetic
ucauguauucacuucagugaaag

SEQ ID NO: 135 - RNA, 23 nt, Artificial
  Synthetic
uaccauguauucacuucagugaa

SEQ ID NO: 136 - DNA, 23 bp, Artificial
  Synthetic
uuaccatguauucacuucaguga

SEQ ID NO: 137 - RNA, 23 nt, Artificial
  Synthetic
ugcuaccauguauucacuucagu

SEQ ID NO: 138 - RNA, 23 nt, Artificial
  Synthetic
uugcuaccauguauucacuucag

SEQ ID NO: 139 - RNA, 23 nt, Artificial
  Synthetic
ugauugaagccacaaaauccaca

SEQ ID NO: 140 - RNA, 23 nt, Artificial
  Synthetic
uguagucacuuagguguuuuuaa

SEQ ID NO: 141 - DNA, 23 bp, Artificial
  Synthetic
ugguagtcacuuagguguuuuua

SEQ ID NO: 142 - RNA, 23 nt, Artificial
  Synthetic
uugguagucacuuagguguuuuu

SEQ ID NO: 143 - RNA, 23 nt, Artificial
  Synthetic
uuaagugguagucacuuaggugu

SEQ ID NO: 144 - RNA, 23 nt, Artificial
  Synthetic
uuagaaauaagugguagucacuu

SEQ ID NO: 145 - RNA, 23 nt, Artificial
  Synthetic
uuaacaacuucugaacaacagca

SEQ ID NO: 146 - RNA, 23 nt, Artificial
  Synthetic
ucuaacaacuucugaacaacagc

SEQ ID NO: 147 - RNA, 23 nt, Artificial
  Synthetic
uacuaacaacuucugaacaacag

SEQ ID NO: 148 - RNA, 23 nt, Artificial
  Synthetic
uaaucacuaacaacuucugaaca

SEQ ID NO: 149 - RNA, 23 nt, Artificial
  Synthetic
uuagcaaaucacuaacaacuucu

SEQ ID NO: 150 - RNA, 23 nt, Artificial
  Synthetic
ucuuagacaguaucauuaaaaga

SEQ ID NO: 151 - RNA, 23 nt, Artificial
  Synthetic
uucauuauucuuagacaguauca

SEQ ID NO: 152 - RNA, 23 nt, Artificial
  Synthetic
uuaggugcauaguuucaugcuca

SEQ ID NO: 153 - RNA, 23 nt, Artificial
  Synthetic
uuauaggugcauaguuucaugcu

SEQ ID NO: 154 - RNA, 23 nt, Artificial
  Synthetic
uuuaaagugagaugggauaaaaa

SEQ ID NO: 155 - RNA, 23 nt, Artificial
  Synthetic
uauuaaagugagaugggauaaaa

SEQ ID NO: 156 - DNA, 23 bp, Artificial
  Synthetic
uauuautaaagugagaugggaua

SEQ ID NO: 157 - DNA, 23 bp, Artificial
  Synthetic
uuagggtuaauguuccauuuucu

SEQ ID NO: 158 - RNA, 23 nt, Artificial
  Synthetic
uaugugcuaauaugugcuaaugu

SEQ ID NO: 159 - RNA, 23 nt, Artificial
  Synthetic
uuagaucuucccugaaagagaaa

SEQ ID NO: 160 - DNA, 23 bp, Artificial
  Synthetic
uauacutucuacuagugacuuuu

SEQ ID NO: 161 - DNA, 23 bp, Artificial
  Synthetic
uuauactuucuacuagugacuuu

SEQ ID NO: 162 - RNA, 23 nt, Artificial
  Synthetic
uagcaugucuagaauauucuguc

SEQ ID NO: 163 - DNA, 23 bp, Artificial
  Synthetic
uuagcatgucuagaauauucugu

SEQ ID NO: 164 - RNA, 23 nt, Artificial
  Synthetic
ucuagcaugucuagaauauucug

SEQ ID NO: 165 - RNA, 23 nt, Artificial
  Synthetic
uauaaacugcuagcaugucuaga

SEQ ID NO: 166 - RNA, 23 nt, Artificial
  Synthetic
ucuuauagucacucauuccuccu

SEQ ID NO: 167 - DNA, 23 bp, Artificial
  Synthetic
uccuuatagucacucauuccucc

SEQ ID NO: 168 - DNA, 23 bp, Artificial
  Synthetic
uaaccatccuuauagucacucau

SEQ ID NO: 169 - RNA, 23 nt, Artificial
  Synthetic
uaugguaaccauccuuauaguca

SEQ ID NO: 170 - DNA, 23 bp, Artificial
  Synthetic
uuauggtaaccauccuuauaguc

SEQ ID NO: 171 - DNA, 23 bp, Artificial
  Synthetic
uaaguutcuaugguaaccauccu

SEQ ID NO: 172 - RNA, 23 nt, Artificial
  Synthetic
ugcuuagcacucuguaguagucu

SEQ ID NO: 173 - RNA, 23 nt, Artificial
  Synthetic
uaugacacaugcagcuuagcacu

SEQ ID NO: 174 - DNA, 23 bp, Artificial
  Synthetic
uuaagatgacacaugcagcuuag

SEQ ID NO: 175 - RNA, 23 nt, Artificial
  Synthetic
uguaagaugacacaugcagcuua

SEQ ID NO: 176 - DNA, 23 bp, Artificial
  Synthetic
uaaccutccugaaauauacuguu

SEQ ID NO: 177 - RNA, 23 nt, Artificial
  Synthetic
uaugcugcuuuagguagauuuaa

SEQ ID NO: 178 - RNA, 23 nt, Artificial
  Synthetic
uugcaaaauaaaccuaggacugg

SEQ ID NO: 179 - RNA, 23 nt, Artificial
  Synthetic
ugucugcaaaauaaaccuaggac

SEQ ID NO: 180 - RNA, 23 nt, Artificial
  Synthetic
uuaugaggcugaauaacuuggga

SEQ ID NO: 181 - RNA, 23 nt, Artificial
  Synthetic
ugucauaugaggcugaauaacuu

SEQ ID NO: 182 - DNA, 23 bp, Artificial
  Synthetic
uagucataugaggcugaauaacu

SEQ ID NO: 183 - RNA, 23 nt, Artificial
  Synthetic
ugagucauaugaggcugaauaac

SEQ ID NO: 184 - DNA, 23 bp, Artificial
  Synthetic
uaacugtuuugguaaagccgacc

SEQ ID NO: 185 - DNA, 23 bp, Artificial
  Synthetic
uugaactguuuugguaaagccga

SEQ ID NO: 186 - RNA, 23 nt, Artificial
  Synthetic
uaagugcacucugaacuguuuug

SEQ ID NO: 187 - RNA, 23 nt, Artificial
  Synthetic
uugugugccaaagugcacucuga

SEQ ID NO: 188 - DNA, 23 bp, Artificial
  Synthetic
uacacatuagauuguucuguucc

SEQ ID NO: 189 - RNA, 23 nt, Artificial
  Synthetic
uccacacauuagauuguucuguu

SEQ ID NO: 190 - RNA, 23 nt, Artificial
  Synthetic
ugaauaccaaaccacacauuaga

SEQ ID NO: 191 - RNA, 23 nt, Artificial
  Synthetic
ucuuggaauaccaaaccacacau

SEQ ID NO: 192 - RNA, 23 nt, Artificial
  Synthetic
uacuuggaauaccaaaccacaca

SEQ ID NO: 193 - RNA, 23 nt, Artificial
  Synthetic
ucgacgacagugugguguaaagg

SEQ ID NO: 194 - RNA, 23 nt, Artificial
  Synthetic
ucaugaaaggacuuucaaaggcc

SEQ ID NO: 195 - RNA, 23 nt, Artificial
  Synthetic
caaaagaggguguucucuaugua

SEQ ID NO: 196 - RNA, 23 nt, Artificial
  Synthetic
aaaagaggguguucucuauguag

SEQ ID NO: 197 - RNA, 23 nt, Artificial
  Synthetic
uucucuauguaggcuccaaaacc

SEQ ID NO: 198 - RNA, 23 nt, Artificial
  Synthetic
agaagaccaaagagcaagugaca

SEQ ID NO: 199 - RNA, 23 nt, Artificial
  Synthetic
ugacaaugaggcuuaugaaaugc

SEQ ID NO: 200 - RNA, 23 nt, Artificial
  Synthetic
aaugaggcuuaugaaaugccuuc

SEQ ID NO: 201 - RNA, 23 nt, Artificial
  Synthetic
gaggaaggguaucaagacuacga

SEQ ID NO: 202 - RNA, 23 nt, Artificial
  Synthetic
ggaaggguaucaagacuacgaac

SEQ ID NO: 203 - RNA, 23 nt, Artificial
  Synthetic
gaaggguaucaagacuacgaacc

SEQ ID NO: 204 - RNA, 23 nt, Artificial
  Synthetic
aaggguaucaagacuacgaaccu

SEQ ID NO: 205 - RNA, 23 nt, Artificial
  Synthetic
aggguaucaagacuacgaaccug

SEQ ID NO: 206 - RNA, 23 nt, Artificial
  Synthetic
ggguaucaagacuacgaaccuga

SEQ ID NO: 207 - RNA, 23 nt, Artificial
  Synthetic
gguaucaagacuacgaaccugaa

SEQ ID NO: 208 - RNA, 23 nt, Artificial
  Synthetic
uaucaagacuacgaaccugaagc

SEQ ID NO: 209 - RNA, 23 nt, Artificial
  Synthetic
aagacuacgaaccugaagccuaa

SEQ ID NO: 210 - RNA, 23 nt, Artificial
  Synthetic
cgaaccugaagccuaagaaauau

SEQ ID NO: 211 - RNA, 23 nt, Artificial
  Synthetic
accugaagccuaagaaauaucuu

SEQ ID NO: 212 - RNA, 23 nt, Artificial
  Synthetic
uuugcucccaguuucuugagauc

SEQ ID NO: 213 - RNA, 23 nt, Artificial
  Synthetic
uugcucccaguuucuugagaucu

SEQ ID NO: 214 - RNA, 23 nt, Artificial
  Synthetic
ugcucccaguuucuugagaucug

SEQ ID NO: 215 - RNA, 23 nt, Artificial
  Synthetic
gcucccaguuucuugagaucugc

SEQ ID NO: 216 - RNA, 23 nt, Artificial
  Synthetic
cucccaguuucuugagaucugcu

SEQ ID NO: 217 - RNA, 23 nt, Artificial
  Synthetic
ccaguuucuugagaucugcugac

SEQ ID NO: 218 - RNA, 23 nt, Artificial
  Synthetic
aguuucuugagaucugcugacag

SEQ ID NO: 219 - RNA, 23 nt, Artificial
  Synthetic
caagugcucaguuccaaugugcc

SEQ ID NO: 220 - RNA, 23 nt, Artificial
  Synthetic
augugcccagucaugacauuucu

SEQ ID NO: 221 - RNA, 23 nt, Artificial
  Synthetic
gcccagucaugacauuucucaaa

SEQ ID NO: 222 - RNA, 23 nt, Artificial
  Synthetic
uccaucagcagugauugaaguau

SEQ ID NO: 223 - RNA, 23 nt, Artificial
  Synthetic
ccuuucacugaagugaauacaug

SEQ ID NO: 224 - RNA, 23 nt, Artificial
  Synthetic
cuuucacugaagugaauacaugg

SEQ ID NO: 225 - RNA, 23 nt, Artificial
  Synthetic
uucacugaagugaauacauggua

SEQ ID NO: 226 - RNA, 23 nt, Artificial
  Synthetic
ucacugaagugaauacaugguag

SEQ ID NO: 227 - RNA, 23 nt, Artificial
  Synthetic
acugaagugaauacaugguagca

SEQ ID NO: 228 - RNA, 23 nt, Artificial
  Synthetic
cugaagugaauacaugguagcag

SEQ ID NO: 229 - RNA, 23 nt, Artificial
  Synthetic
uguggauuuuguggcuucaaucu

SEQ ID NO: 230 - RNA, 23 nt, Artificial
  Synthetic
uuaaaaacaccuaagugacuacc

SEQ ID NO: 231 - RNA, 23 nt, Artificial
  Synthetic
uaaaaacaccuaagugacuacca

SEQ ID NO: 232 - RNA, 23 nt, Artificial
  Synthetic
aaaaacaccuaagugacuaccac

SEQ ID NO: 233 - RNA, 23 nt, Artificial
  Synthetic
acaccuaagugacuaccacuuau

SEQ ID NO: 234 - RNA, 23 nt, Artificial
  Synthetic
aagugacuaccacuuauuucuaa

SEQ ID NO: 235 - RNA, 23 nt, Artificial
  Synthetic
ugcuguuguucagaaguuguuag

SEQ ID NO: 236 - RNA, 23 nt, Artificial
  Synthetic
gcuguuguucagaaguuguuagu

SEQ ID NO: 237 - RNA, 23 nt, Artificial
  Synthetic
cuguuguucagaaguuguuagug

SEQ ID NO: 238 - RNA, 23 nt, Artificial
  Synthetic
uguucagaaguuguuagugauuu

SEQ ID NO: 239 - RNA, 23 nt, Artificial
  Synthetic
agaaguuguuagugauuugcuau

SEQ ID NO: 240 - RNA, 23 nt, Artificial
  Synthetic
ucuuuuaaugauacugucuaaga

SEQ ID NO: 241 - RNA, 23 nt, Artificial
  Synthetic
ugauacugucuaagaauaaugac

SEQ ID NO: 242 - RNA, 23 nt, Artificial
  Synthetic
ugagcaugaaacuaugcaccuau

SEQ ID NO: 243 - RNA, 23 nt, Artificial
  Synthetic
agcaugaaacuaugcaccuauaa

SEQ ID NO: 244 - RNA, 23 nt, Artificial
  Synthetic
uuuuuaucccaucucacuuuaau

SEQ ID NO: 245 - RNA, 23 nt, Artificial
  Synthetic
uuuuaucccaucucacuuuaaua

SEQ ID NO: 246 - RNA, 23 nt, Artificial
  Synthetic
uaucccaucucacuuuaauaaua

SEQ ID NO: 247 - RNA, 23 nt, Artificial
  Synthetic
agaaaauggaacauuaacccuac

SEQ ID NO: 248 - RNA, 23 nt, Artificial
  Synthetic
acauuagcacauauuagcacauu

SEQ ID NO: 249 - RNA, 23 nt, Artificial
  Synthetic
uuucucuuucagggaagaucuau

SEQ ID NO: 250 - RNA, 23 nt, Artificial
  Synthetic
aaaagucacuaguagaaaguaua

SEQ ID NO: 251 - RNA, 23 nt, Artificial
  Synthetic
aaagucacuaguagaaaguauaa

SEQ ID NO: 252 - RNA, 23 nt, Artificial
  Synthetic
gacagaauauucuagacaugcua

SEQ ID NO: 253 - RNA, 23 nt, Artificial
  Synthetic
acagaauauucuagacaugcuag

SEQ ID NO: 254 - RNA, 23 nt, Artificial
  Synthetic
cagaauauucuagacaugcuagc

SEQ ID NO: 255 - RNA, 23 nt, Artificial
  Synthetic
ucuagacaugcuagcaguuuaua

SEQ ID NO: 256 - RNA, 23 nt, Artificial
  Synthetic
aggaggaaugagugacuauaagg

SEQ ID NO: 257 - RNA, 23 nt, Artificial
  Synthetic
ggaggaaugagugacuauaagga

SEQ ID NO: 258 - RNA, 23 nt, Artificial
  Synthetic
augagugacuauaaggaugguua

SEQ ID NO: 259 - RNA, 23 nt, Artificial
  Synthetic
ugacuauaaggaugguuaccaua

SEQ ID NO: 260 - RNA, 23 nt, Artificial
  Synthetic
gacuauaaggaugguuaccauag

SEQ ID NO: 261 - RNA, 23 nt, Artificial
  Synthetic
aggaugguuaccauagaaacuuc

SEQ ID NO: 262 - RNA, 23 nt, Artificial
  Synthetic
agacuacuacagagugcuaagcu

SEQ ID NO: 263 - RNA, 23 nt, Artificial
  Synthetic
agugcuaagcugcaugugucauc

SEQ ID NO: 264 - RNA, 23 nt, Artificial
  Synthetic
cuaagcugcaugugucaucuuac

SEQ ID NO: 265 - RNA, 23 nt, Artificial
  Synthetic
uaagcugcaugugucaucuuaca

SEQ ID NO: 266 - RNA, 23 nt, Artificial
  Synthetic
aacaguauauuucaggaagguua

SEQ ID NO: 267 - RNA, 23 nt, Artificial
  Synthetic
uuaaaucuaccuaaagcagcaua

SEQ ID NO: 268 - RNA, 23 nt, Artificial
  Synthetic
ccaguccuagguuuauuuugcag

SEQ ID NO: 269 - RNA, 23 nt, Artificial
  Synthetic
guccuagguuuauuuugcagacu

SEQ ID NO: 270 - RNA, 23 nt, Artificial
  Synthetic
ucccaaguuauucagccucauau

SEQ ID NO: 271 - RNA, 23 nt, Artificial
  Synthetic
aaguuauucagccucauaugacu

SEQ ID NO: 272 - RNA, 23 nt, Artificial
  Synthetic
aguuauucagccucauaugacuc

SEQ ID NO: 273 - RNA, 23 nt, Artificial
  Synthetic
guuauucagccucauaugacucc

SEQ ID NO: 274 - RNA, 23 nt, Artificial
  Synthetic
ggucggcuuuaccaaaacaguuc

SEQ ID NO: 275 - RNA, 23 nt, Artificial
  Synthetic
ucggcuuuaccaaaacaguucag

SEQ ID NO: 276 - RNA, 23 nt, Artificial
  Synthetic
caaaacaguucagagugcacuuu

SEQ ID NO: 277 - RNA, 23 nt, Artificial
  Synthetic
ucagagugcacuuuggcacacaa

SEQ ID NO: 278 - RNA, 23 nt, Artificial
  Synthetic
ggaacagaacaaucuaaugugug

SEQ ID NO: 279 - RNA, 23 nt, Artificial
  Synthetic
aacagaacaaucuaauguguggu

SEQ ID NO: 280 - RNA, 23 nt, Artificial
  Synthetic
ucuaaugugugguuugguauucc

SEQ ID NO: 281 - RNA, 23 nt, Artificial
  Synthetic
augugugguuugguauuccaagu

SEQ ID NO: 282 - RNA, 23 nt, Artificial
  Synthetic
ugugugguuugguauuccaagug

SEQ ID NO: 283 - RNA, 21 nt, Artificial
  Synthetic
gacgacagugugguguaaaga

SEQ ID NO: 284 - RNA, 21 nt, Artificial
  Synthetic
augaaaggacuuucaaaggca

SEQ ID NO: 285 - RNA, 21 nt, Artificial
  Synthetic
aaagaggguguucucuaugua

SEQ ID NO: 286 - RNA, 21 nt, Artificial
  Synthetic
aagaggguguucucuauguaa

SEQ ID NO: 287 - RNA, 21 nt, Artificial
  Synthetic
cucuauguaggcuccaaaaca

SEQ ID NO: 288 - RNA, 21 nt, Artificial
  Synthetic
aagaccaaagagcaagugaca

SEQ ID NO: 289 - RNA, 21 nt, Artificial
  Synthetic
acaaugaggcuuaugaaauga

SEQ ID NO: 290 - RNA, 21 nt, Artificial
  Synthetic
ugaggcuuaugaaaugccuua

SEQ ID NO: 291 - RNA, 21 nt, Artificial
  Synthetic
ggaaggguaucaagacuacga

SEQ ID NO: 292 - RNA, 21 nt, Artificial
  Synthetic
aaggguaucaagacuacgaaa

SEQ ID NO: 293 - RNA, 21 nt, Artificial
  Synthetic
aggguaucaagacuacgaaca

SEQ ID NO: 294 - RNA, 21 nt, Artificial
  Synthetic
ggguaucaagacuacgaacca

SEQ ID NO: 295 - RNA, 21 nt, Artificial
  Synthetic
gguaucaagacuacgaaccua

SEQ ID NO: 296 - RNA, 21 nt, Artificial
  Synthetic
guaucaagacuacgaaccuga

SEQ ID NO: 297 - RNA, 21 nt, Artificial
  Synthetic
uaucaagacuacgaaccugaa

SEQ ID NO: 298 - RNA, 21 nt, Artificial
  Synthetic
ucaagacuacgaaccugaaga

SEQ ID NO: 299 - RNA, 21 nt, Artificial
  Synthetic
gacuacgaaccugaagccuaa

SEQ ID NO: 300 - RNA, 21 nt, Artificial
  Synthetic
aaccugaagccuaagaaauaa

SEQ ID NO: 301 - RNA, 21 nt, Artificial
  Synthetic
cugaagccuaagaaauaucua

SEQ ID NO: 302 - RNA, 21 nt, Artificial
  Synthetic
ugcucccaguuucuugagaua

SEQ ID NO: 303 - RNA, 21 nt, Artificial
  Synthetic
gcucccaguuucuugagauca

SEQ ID NO: 304 - RNA, 21 nt, Artificial
  Synthetic
cucccaguuucuugagaucua

SEQ ID NO: 305 - RNA, 21 nt, Artificial
  Synthetic
ucccaguuucuugagaucuga

SEQ ID NO: 306 - RNA, 21 nt, Artificial
  Synthetic
cccaguuucuugagaucugca

SEQ ID NO: 307 - RNA, 21 nt, Artificial
  Synthetic
aguuucuugagaucugcugaa

SEQ ID NO: 308 - RNA, 21 nt, Artificial
  Synthetic
uuucuugagaucugcugacaa

SEQ ID NO: 309 - RNA, 21 nt, Artificial
  Synthetic
agugcucaguuccaaugugca

SEQ ID NO: 310 - RNA, 21 nt, Artificial
  Synthetic
gugcccagucaugacauuuca

SEQ ID NO: 311 - RNA, 21 nt, Artificial
  Synthetic
ccagucaugacauuucucaaa

SEQ ID NO: 312 - RNA, 21 nt, Artificial
  Synthetic
caucagcagugauugaaguaa

SEQ ID NO: 313 - RNA, 21 nt, Artificial
  Synthetic
uuucacugaagugaauacaua

SEQ ID NO: 314 - RNA, 21 nt, Artificial
  Synthetic
uucacugaagugaauacauga

SEQ ID NO: 315 - RNA, 21 nt, Artificial
  Synthetic
cacugaagugaauacauggua

SEQ ID NO: 316 - RNA, 21 nt, Artificial
  Synthetic
acugaagugaauacaugguaa

SEQ ID NO: 317 - RNA, 21 nt, Artificial
  Synthetic
ugaagugaauacaugguagca

SEQ ID NO: 318 - RNA, 21 nt, Artificial
  Synthetic
gaagugaauacaugguagcaa

SEQ ID NO: 319 - RNA, 21 nt, Artificial
  Synthetic
uggauuuuguggcuucaauca

SEQ ID NO: 320 - RNA, 21 nt, Artificial
  Synthetic
aaaaacaccuaagugacuaca

SEQ ID NO: 321 - RNA, 21 nt, Artificial
  Synthetic
aaaacaccuaagugacuacca

SEQ ID NO: 322 - RNA, 21 nt, Artificial
  Synthetic
aaacaccuaagugacuaccaa

SEQ ID NO: 323 - RNA, 21 nt, Artificial
  Synthetic
accuaagugacuaccacuuaa

SEQ ID NO: 324 - RNA, 21 nt, Artificial
  Synthetic
gugacuaccacuuauuucuaa

SEQ ID NO: 325 - RNA, 21 nt, Artificial
  Synthetic
cuguuguucagaaguuguuaa

SEQ ID NO: 326 - RNA, 21 nt, Artificial
  Synthetic
uguuguucagaaguuguuaga

SEQ ID NO: 327 - RNA, 21 nt, Artificial
  Synthetic
guuguucagaaguuguuagua

SEQ ID NO: 328 - RNA, 21 nt, Artificial
  Synthetic
uucagaaguuguuagugauua

SEQ ID NO: 329 - RNA, 21 nt, Artificial
  Synthetic
aaguuguuagugauuugcuaa

SEQ ID NO: 330 - RNA, 21 nt, Artificial
  Synthetic
uuuuaaugauacugucuaaga

SEQ ID NO: 331 - RNA, 21 nt, Artificial
  Synthetic
auacugucuaagaauaaugaa

SEQ ID NO: 332 - RNA, 21 nt, Artificial
  Synthetic
agcaugaaacuaugcaccuaa

SEQ ID NO: 333 - RNA, 21 nt, Artificial
  Synthetic
caugaaacuaugcaccuauaa

SEQ ID NO: 334 - RNA, 21 nt, Artificial
  Synthetic
uuuaucccaucucacuuuaaa

SEQ ID NO: 335 - RNA, 21 nt, Artificial
  Synthetic
uuaucccaucucacuuuaaua

SEQ ID NO: 336 - RNA, 21 nt, Artificial
  Synthetic
ucccaucucacuuuaauaaua

SEQ ID NO: 337 - RNA, 21 nt, Artificial
  Synthetic
aaaauggaacauuaacccuaa

SEQ ID NO: 338 - RNA, 21 nt, Artificial
  Synthetic
auuagcacauauuagcacaua

SEQ ID NO: 339 - RNA, 21 nt, Artificial
  Synthetic
ucucuuucagggaagaucuaa

SEQ ID NO: 340 - RNA, 21 nt, Artificial
  Synthetic
aagucacuaguagaaaguaua

SEQ ID NO: 341 - RNA, 21 nt, Artificial
  Synthetic
agucacuaguagaaaguauaa

SEQ ID NO: 342 - RNA, 21 nt, Artificial
  Synthetic
cagaauauucuagacaugcua

SEQ ID NO: 343 - RNA, 21 nt, Artificial
  Synthetic
agaauauucuagacaugcuaa

SEQ ID NO: 344 - RNA, 21 nt, Artificial
  Synthetic
gaauauucuagacaugcuaga

SEQ ID NO: 345 - RNA, 21 nt, Artificial
  Synthetic
uagacaugcuagcaguuuaua

SEQ ID NO: 346 - RNA, 21 nt, Artificial
  Synthetic
gaggaaugagugacuauaaga

SEQ ID NO: 347 - RNA, 21 nt, Artificial
  Synthetic
aggaaugagugacuauaagga

SEQ ID NO: 348 - RNA, 21 nt, Artificial
  Synthetic
gagugacuauaaggaugguua

SEQ ID NO: 349 - RNA, 21 nt, Artificial
  Synthetic
acuauaaggaugguuaccaua

SEQ ID NO: 350 - RNA, 21 nt, Artificial
  Synthetic
cuauaaggaugguuaccauaa

SEQ ID NO: 351 - RNA, 21 nt, Artificial
  Synthetic
gaugguuaccauagaaacuua

SEQ ID NO: 352 - RNA, 21 nt, Artificial
  Synthetic
acuacuacagagugcuaagca

SEQ ID NO: 353 - RNA, 21 nt, Artificial
  Synthetic
ugcuaagcugcaugugucaua

SEQ ID NO: 354 - RNA, 21 nt, Artificial
  Synthetic
aagcugcaugugucaucuuaa

SEQ ID NO: 355 - RNA, 21 nt, Artificial
  Synthetic
agcugcaugugucaucuuaca

SEQ ID NO: 356 - RNA, 21 nt, Artificial
  Synthetic
caguauauuucaggaagguua

SEQ ID NO: 357 - RNA, 21 nt, Artificial
  Synthetic
aaaucuaccuaaagcagcaua

SEQ ID NO: 358 - RNA, 21 nt, Artificial
  Synthetic
aguccuagguuuauuuugcaa

SEQ ID NO: 359 - RNA, 21 nt, Artificial
  Synthetic
ccuagguuuauuuugcagaca

SEQ ID NO: 360 - RNA, 21 nt, Artificial
  Synthetic
ccaaguuauucagccucauaa

SEQ ID NO: 361 - RNA, 21 nt, Artificial
  Synthetic
guuauucagccucauaugaca

SEQ ID NO: 362 - RNA, 21 nt, Artificial
  Synthetic
uuauucagccucauaugacua

SEQ ID NO: 363 - RNA, 21 nt, Artificial
  Synthetic
uauucagccucauaugacuca

SEQ ID NO: 364 - RNA, 21 nt, Artificial
  Synthetic
ucggcuuuaccaaaacaguua

SEQ ID NO: 365 - RNA, 21 nt, Artificial
  Synthetic
ggcuuuaccaaaacaguucaa

SEQ ID NO: 366 - RNA, 21 nt, Artificial
  Synthetic
aaacaguucagagugcacuua

SEQ ID NO: 367 - RNA, 21 nt, Artificial
  Synthetic
agagugcacuuuggcacacaa

SEQ ID NO: 368 - RNA, 21 nt, Artificial
  Synthetic
aacagaacaaucuaaugugua

SEQ ID NO: 369 - RNA, 21 nt, Artificial
  Synthetic
cagaacaaucuaaugugugga

SEQ ID NO: 370 - RNA, 21 nt, Artificial
  Synthetic
uaaugugugguuugguauuca

SEQ ID NO: 371 - RNA, 21 nt, Artificial
  Synthetic
gugugguuugguauuccaaga

SEQ ID NO: 372 - RNA, 21 nt, Artificial
  Synthetic
ugugguuugguauuccaagua

SEQ ID NO: 373 - RNA, 23 nt, Artificial
  Synthetic
ucuuuacaccacacugucgucga

SEQ ID NO: 374 - DNA, 23 bp, Artificial
  Synthetic
ugccuutgaaaguccuuucauga

SEQ ID NO: 375 - RNA, 23 nt, Artificial
  Synthetic
uacauagagaacacccucuuuug

SEQ ID NO: 376 - RNA, 23 nt, Artificial
  Synthetic
uuacauagagaacacccucuuuu

SEQ ID NO: 377 - RNA, 23 nt, Artificial
  Synthetic
uguuuuggagccuacauagagaa

SEQ ID NO: 378 - DNA, 23 bp, Artificial
  Synthetic
ugucactugcucuuuggucuucu

SEQ ID NO: 379 - RNA, 23 nt, Artificial
  Synthetic
ucauuucauaagccucauuguca

SEQ ID NO: 380 - RNA, 23 nt, Artificial
  Synthetic
uaaggcauuucauaagccucauu

SEQ ID NO: 381 - DNA, 23 bp, Artificial
  Synthetic
ucguagtcuugauacccuuccuc

SEQ ID NO: 382 - RNA, 23 nt, Artificial
  Synthetic
uuucguagucuugauacccuucc

SEQ ID NO: 383 - DNA, 23 bp, Artificial
  Synthetic
uguucgtagucuugauacccuuc

SEQ ID NO: 384 - RNA, 23 nt, Artificial
  Synthetic
ugguucguagucuugauacccuu

SEQ ID NO: 385 - RNA, 23 nt, Artificial
  Synthetic
uagguucguagucuugauacccu

SEQ ID NO: 386 - DNA, 23 bp, Artificial
  Synthetic
ucaggutcguagucuugauaccc

SEQ ID NO: 387 - DNA, 23 bp, Artificial
  Synthetic
uucaggtucguagucuugauacc

SEQ ID NO: 388 - RNA, 23 nt, Artificial
  Synthetic
ucuucagguucguagucuugaua

SEQ ID NO: 389 - DNA, 23 bp, Artificial
  Synthetic
uuaggctucagguucguagucuu

SEQ ID NO: 390 - RNA, 23 nt, Artificial
  Synthetic
uuauuucuuaggcuucagguucg

SEQ ID NO: 391 - DNA, 23 bp, Artificial
  Synthetic
uagauatuucuuaggcuucaggu

SEQ ID NO: 392 - RNA, 23 nt, Artificial
  Synthetic
uaucucaagaaacugggagcaaa

SEQ ID NO: 393 - RNA, 23 nt, Artificial
  Synthetic
ugaucucaagaaacugggagcaa

SEQ ID NO: 394 - DNA, 23 bp, Artificial
  Synthetic
uagauctcaagaaacugggagca

SEQ ID NO: 395 - RNA, 23 nt, Artificial
  Synthetic
ucagaucucaagaaacugggagc

SEQ ID NO: 396 - DNA, 23 bp, Artificial
  Synthetic
ugcagatcucaagaaacugggag

SEQ ID NO: 397 - RNA, 23 nt, Artificial
  Synthetic
uucagcagaucucaagaaacugg

SEQ ID NO: 398 - RNA, 23 nt, Artificial
  Synthetic
uugucagcagaucucaagaaacu

SEQ ID NO: 399 - DNA, 23 bp, Artificial
  Synthetic
ugcacatuggaacugagcacuug

SEQ ID NO: 400 - RNA, 23 nt, Artificial
  Synthetic
ugaaaugucaugacugggcacau

SEQ ID NO: 401 - RNA, 23 nt, Artificial
  Synthetic
uuugagaaaugucaugacugggc

SEQ ID NO: 402 - RNA, 23 nt, Artificial
  Synthetic
uuacuucaaucacugcugaugga

SEQ ID NO: 403 - DNA, 23 bp, Artificial
  Synthetic
uauguatucacuucagugaaagg

SEQ ID NO: 404 - RNA, 23 nt, Artificial
  Synthetic
ucauguauucacuucagugaaag

SEQ ID NO: 405 - RNA, 23 nt, Artificial
  Synthetic
uaccauguauucacuucagugaa

SEQ ID NO: 406 - DNA, 23 bp, Artificial
  Synthetic
uuaccatguauucacuucaguga

SEQ ID NO: 407 - RNA, 23 nt, Artificial
  Synthetic
ugcuaccauguauucacuucagu

SEQ ID NO: 408 - RNA, 23 nt, Artificial
  Synthetic
uugcuaccauguauucacuucag

SEQ ID NO: 409 - RNA, 23 nt, Artificial
  Synthetic
ugauugaagccacaaaauccaca

SEQ ID NO: 410 - RNA, 23 nt, Artificial
  Synthetic
uguagucacuuagguguuuuuaa

SEQ ID NO: 411 - DNA, 23 bp, Artificial
  Synthetic
ugguagtcacuuagguguuuuua

SEQ ID NO: 412 - RNA, 23 nt, Artificial
  Synthetic
uugguagucacuuagguguuuuu

SEQ ID NO: 413 - RNA, 23 nt, Artificial
  Synthetic
uuaagugguagucacuuaggugu

SEQ ID NO: 414 - RNA, 23 nt, Artificial
  Synthetic
uuagaaauaagugguagucacuu

SEQ ID NO: 415 - RNA, 23 nt, Artificial
  Synthetic
uuaacaacuucugaacaacagca

SEQ ID NO: 416 - RNA, 23 nt, Artificial
  Synthetic
ucuaacaacuucugaacaacagc

SEQ ID NO: 417 - RNA, 23 nt, Artificial
  Synthetic
uacuaacaacuucugaacaacag

SEQ ID NO: 418 - RNA, 23 nt, Artificial
  Synthetic
uaaucacuaacaacuucugaaca

SEQ ID NO: 419 - RNA, 23 nt, Artificial
  Synthetic
uuagcaaaucacuaacaacuucu

SEQ ID NO: 420 - RNA, 23 nt, Artificial
  Synthetic
ucuuagacaguaucauuaaaaga

SEQ ID NO: 421 - RNA, 23 nt, Artificial
  Synthetic
uucauuauucuuagacaguauca

SEQ ID NO: 422 - RNA, 23 nt, Artificial
  Synthetic
uuaggugcauaguuucaugcuca

SEQ ID NO: 423 - RNA, 23 nt, Artificial
  Synthetic
uuauaggugcauaguuucaugcu

SEQ ID NO: 424 - RNA, 23 nt, Artificial
  Synthetic
uuuaaagugagaugggauaaaaa

SEQ ID NO: 425 - RNA, 23 nt, Artificial
  Synthetic
uauuaaagugagaugggauaaaa

SEQ ID NO: 426 - DNA, 23 bp, Artificial
  Synthetic
uauuautaaagugagaugggaua

SEQ ID NO: 427 - DNA, 23 bp, Artificial
  Synthetic
uuagggtuaauguuccauuuucu

SEQ ID NO: 428 - RNA, 23 nt, Artificial
  Synthetic
uaugugcuaauaugugcuaaugu

SEQ ID NO: 429 - RNA, 23 nt, Artificial
  Synthetic
uuagaucuucccugaaagagaaa

SEQ ID NO: 430 - DNA, 23 bp, Artificial
  Synthetic
uauacutucuacuagugacuuuu

SEQ ID NO: 431 - DNA, 23 bp, Artificial
  Synthetic
uuauactuucuacuagugacuuu

SEQ ID NO: 432 - RNA, 23 nt, Artificial
  Synthetic
uagcaugucuagaauauucuguc

SEQ ID NO: 433 - DNA, 23 bp, Artificial
  Synthetic
uuagcatgucuagaauauucugu

SEQ ID NO: 434 - RNA, 23 nt, Artificial
  Synthetic
ucuagcaugucuagaauauucug

SEQ ID NO: 435 - RNA, 23 nt, Artificial
  Synthetic
uauaaacugcuagcaugucuaga

SEQ ID NO: 436 - RNA, 23 nt, Artificial
  Synthetic
ucuuauagucacucauuccuccu

SEQ ID NO: 437 - DNA, 23 bp, Artificial
  Synthetic
uccuuatagucacucauuccucc

SEQ ID NO: 438 - DNA, 23 bp, Artificial
  Synthetic
uaaccatccuuauagucacucau

SEQ ID NO: 439 - RNA, 23 nt, Artificial
  Synthetic
uaugguaaccauccuuauaguca

SEQ ID NO: 440 - DNA, 23 bp, Artificial
  Synthetic
uuauggtaaccauccuuauaguc

SEQ ID NO: 441 - DNA, 23 bp, Artificial
  Synthetic
uaaguutcuaugguaaccauccu

SEQ ID NO: 442 - RNA, 23 nt, Artificial
  Synthetic
ugcuuagcacucuguaguagucu

SEQ ID NO: 443 - RNA, 23 nt, Artificial
  Synthetic
uaugacacaugcagcuuagcacu

SEQ ID NO: 444 - DNA, 23 bp, Artificial
  Synthetic
uuaagatgacacaugcagcuuag

SEQ ID NO: 445 - RNA, 23 nt, Artificial
  Synthetic
uguaagaugacacaugcagcuua

SEQ ID NO: 446 - DNA, 23 bp, Artificial
  Synthetic
uaaccutccugaaauauacuguu

SEQ ID NO: 447 - RNA, 23 nt, Artificial
  Synthetic
uaugcugcuuuagguagauuuaa

SEQ ID NO: 448 - RNA, 23 nt, Artificial
  Synthetic
uugcaaaauaaaccuaggacugg

SEQ ID NO: 449 - RNA, 23 nt, Artificial
  Synthetic
ugucugcaaaauaaaccuaggac

SEQ ID NO: 450 - RNA, 23 nt, Artificial
  Synthetic
uuaugaggcugaauaacuuggga

SEQ ID NO: 451 - RNA, 23 nt, Artificial
  Synthetic
ugucauaugaggcugaauaacuu

SEQ ID NO: 452 - DNA, 23 bp, Artificial
  Synthetic
uagucataugaggcugaauaacu

SEQ ID NO: 453 - RNA, 23 nt, Artificial
  Synthetic
ugagucauaugaggcugaauaac

SEQ ID NO: 454 - DNA, 23 bp, Artificial
  Synthetic
uaacugtuuugguaaagccgacc

SEQ ID NO: 455 - DNA, 23 bp, Artificial
  Synthetic
uugaactguuuugguaaagccga

SEQ ID NO: 456 - RNA, 23 nt, Artificial
  Synthetic
uaagugcacucugaacuguuuug

SEQ ID NO: 457 - RNA, 23 nt, Artificial
  Synthetic
uugugugccaaagugcacucuga

SEQ ID NO: 458 - DNA, 23 bp, Artificial
  Synthetic
uacacatuagauuguucuguucc

SEQ ID NO: 459 - RNA, 23 nt, Artificial
  Synthetic
uccacacauuagauuguucuguu

SEQ ID NO: 460 - RNA, 23 nt, Artificial
  Synthetic
ugaauaccaaaccacacauuaga

SEQ ID NO: 461 - RNA, 23 nt, Artificial
  Synthetic
ucuuggaauaccaaaccacacau

SEQ ID NO: 462 - RNA, 23 nt, Artificial
  Synthetic
uacuuggaauaccaaaccacaca

SEQ ID NO: 463 - RNA, 21 nt, Artificial
  Synthetic
gacgacagugugguguaaaga

SEQ ID NO: 464 - RNA, 21 nt, Artificial
  Synthetic
augaaaggacuuucaaaggca

SEQ ID NO: 465 - RNA, 21 nt, Artificial
  Synthetic
aaagaggguguucucuaugua

SEQ ID NO: 466 - RNA, 21 nt, Artificial
  Synthetic
aagaggguguucucuauguaa

SEQ ID NO: 467 - RNA, 21 nt, Artificial
  Synthetic
cucuauguaggcuccaaaaca

SEQ ID NO: 468 - RNA, 21 nt, Artificial
  Synthetic
aagaccaaagagcaagugaca

SEQ ID NO: 469 - RNA, 21 nt, Artificial
  Synthetic
acaaugaggcuuaugaaauga

SEQ ID NO: 470 - RNA, 21 nt, Artificial
  Synthetic
ugaggcuuaugaaaugccuua

SEQ ID NO: 471 - RNA, 21 nt, Artificial
  Synthetic
ggaaggguaucaagacuacga

SEQ ID NO: 472 - RNA, 21 nt, Artificial
  Synthetic
aaggguaucaagacuacgaaa

SEQ ID NO: 473 - RNA, 21 nt, Artificial
  Synthetic
aggguaucaagacuacgaaca

SEQ ID NO: 474 - RNA, 21 nt, Artificial
  Synthetic
ggguaucaagacuacgaacca

SEQ ID NO: 475 - RNA, 21 nt, Artificial
  Synthetic
gguaucaagacuacgaaccua

SEQ ID NO: 476 - RNA, 21 nt, Artificial
  Synthetic
guaucaagacuacgaaccuga

SEQ ID NO: 477 - RNA, 21 nt, Artificial
  Synthetic
uaucaagacuacgaaccugaa

SEQ ID NO: 478 - RNA, 21 nt, Artificial
  Synthetic
ucaagacuacgaaccugaaga

SEQ ID NO: 479 - RNA, 21 nt, Artificial
  Synthetic
gacuacgaaccugaagccuaa

SEQ ID NO: 480 - RNA, 21 nt, Artificial
  Synthetic
aaccugaagccuaagaaauaa

SEQ ID NO: 481 - RNA, 21 nt, Artificial
  Synthetic
cugaagccuaagaaauaucua

SEQ ID NO: 482 - RNA, 21 nt, Artificial
  Synthetic
ugcucccaguuucuugagaua

SEQ ID NO: 483 - RNA, 21 nt, Artificial
  Synthetic
gcucccaguuucuugagauca

SEQ ID NO: 484 - RNA, 21 nt, Artificial
  Synthetic
cucccaguuucuugagaucua

SEQ ID NO: 485 - RNA, 21 nt, Artificial
  Synthetic
ucccaguuucuugagaucuga

SEQ ID NO: 486 - RNA, 21 nt, Artificial
  Synthetic
cccaguuucuugagaucugca

SEQ ID NO: 487 - RNA, 21 nt, Artificial
  Synthetic
aguuucuugagaucugcugaa

SEQ ID NO: 488 - RNA, 21 nt, Artificial
  Synthetic
uuucuugagaucugcugacaa

SEQ ID NO: 489 - RNA, 21 nt, Artificial
  Synthetic
agugcucaguuccaaugugca

SEQ ID NO: 490 - RNA, 21 nt, Artificial
  Synthetic
gugcccagucaugacauuuca

SEQ ID NO: 491 - RNA, 21 nt, Artificial
  Synthetic
ccagucaugacauuucucaaa

SEQ ID NO: 492 - RNA, 21 nt, Artificial
  Synthetic
caucagcagugauugaaguaa

SEQ ID NO: 493 - RNA, 21 nt, Artificial
  Synthetic
uuucacugaagugaauacaua

SEQ ID NO: 494 - RNA, 21 nt, Artificial
  Synthetic
uucacugaagugaauacauga

SEQ ID NO: 495 - RNA, 21 nt, Artificial
  Synthetic
cacugaagugaauacauggua

SEQ ID NO: 496 - RNA, 21 nt, Artificial
  Synthetic
acugaagugaauacaugguaa

SEQ ID NO: 497 - RNA, 21 nt, Artificial
  Synthetic
ugaagugaauacaugguagca

SEQ ID NO: 498 - RNA, 21 nt, Artificial
  Synthetic
gaagugaauacaugguagcaa

SEQ ID NO: 499 - RNA, 21 nt, Artificial
  Synthetic
uggauuuuguggcuucaauca

SEQ ID NO: 500 - RNA, 21 nt, Artificial
  Synthetic
aaaaacaccuaagugacuaca

SEQ ID NO: 501 - RNA, 21 nt, Artificial
  Synthetic
aaaacaccuaagugacuacca

SEQ ID NO: 502 - RNA, 21 nt, Artificial
  Synthetic
aaacaccuaagugacuaccaa

SEQ ID NO: 503 - RNA, 21 nt, Artificial
  Synthetic
accuaagugacuaccacuuaa

SEQ ID NO: 504 - RNA, 21 nt, Artificial
  Synthetic
gugacuaccacuuauuucuaa

SEQ ID NO: 505 - RNA, 21 nt, Artificial
  Synthetic
cuguuguucagaaguuguuaa

SEQ ID NO: 506 - RNA, 21 nt, Artificial
  Synthetic
uguuguucagaaguuguuaga

SEQ ID NO: 507 - RNA, 21 nt, Artificial
  Synthetic
guuguucagaaguuguuagua

SEQ ID NO: 508 - RNA, 21 nt, Artificial
  Synthetic
uucagaaguuguuagugauua

SEQ ID NO: 509 - RNA, 21 nt, Artificial
  Synthetic
aaguuguuagugauuugcuaa

SEQ ID NO: 510 - RNA, 21 nt, Artificial
  Synthetic
uuuuaaugauacugucuaaga

SEQ ID NO: 511 - RNA, 21 nt, Artificial
  Synthetic
auacugucuaagaauaaugaa

SEQ ID NO: 512 - RNA, 21 nt, Artificial
  Synthetic
agcaugaaacuaugcaccuaa

SEQ ID NO: 513 - RNA, 21 nt, Artificial
  Synthetic
caugaaacuaugcaccuauaa

SEQ ID NO: 514 - RNA, 21 nt, Artificial
  Synthetic
uuuaucccaucucacuuuaaa

SEQ ID NO: 515 - RNA, 21 nt, Artificial
  Synthetic
uuaucccaucucacuuuaaua

SEQ ID NO: 516 - RNA, 21 nt, Artificial
  Synthetic
ucccaucucacuuuaauaaua

SEQ ID NO: 517 - RNA, 21 nt, Artificial
  Synthetic
aaaauggaacauuaacccuaa

SEQ ID NO: 518 - RNA, 21 nt, Artificial
  Synthetic
auuagcacauauuagcacaua

SEQ ID NO: 519 - RNA, 21 nt, Artificial
  Synthetic
ucucuuucagggaagaucuaa

SEQ ID NO: 520 - RNA, 21 nt, Artificial
  Synthetic
aagucacuaguagaaaguaua

SEQ ID NO: 521 - RNA, 21 nt, Artificial
  Synthetic
agucacuaguagaaaguauaa

SEQ ID NO: 522 - RNA, 21 nt, Artificial
  Synthetic
cagaauauucuagacaugcua

SEQ ID NO: 523 - RNA, 21 nt, Artificial
  Synthetic
agaauauucuagacaugcuaa

SEQ ID NO: 524 - RNA, 21 nt, Artificial
  Synthetic
gaauauucuagacaugcuaga

SEQ ID NO: 525 - RNA, 21 nt, Artificial
  Synthetic
uagacaugcuagcaguuuaua

SEQ ID NO: 526 - RNA, 21 nt, Artificial
  Synthetic
gaggaaugagugacuauaaga

SEQ ID NO: 527 - RNA, 21 nt, Artificial
  Synthetic
aggaaugagugacuauaagga

SEQ ID NO: 528 - RNA, 21 nt, Artificial
  Synthetic
gagugacuauaaggaugguua

SEQ ID NO: 529 - RNA, 21 nt, Artificial
  Synthetic
acuauaaggaugguuaccaua

SEQ ID NO: 530 - RNA, 21 nt, Artificial
  Synthetic
cuauaaggaugguuaccauaa

SEQ ID NO: 531 - RNA, 21 nt, Artificial
  Synthetic
gaugguuaccauagaaacuua

SEQ ID NO: 532 - RNA, 21 nt, Artificial
  Synthetic
acuacuacagagugcuaagca

SEQ ID NO: 533 - RNA, 21 nt, Artificial
  Synthetic
ugcuaagcugcaugugucaua

SEQ ID NO: 534 - RNA, 21 nt, Artificial
  Synthetic
aagcugcaugugucaucuuaa

SEQ ID NO: 535 - RNA, 21 nt, Artificial
  Synthetic
agcugcaugugucaucuuaca

SEQ ID NO: 536 - RNA, 21 nt, Artificial
  Synthetic
caguauauuucaggaagguua

SEQ ID NO: 537 - RNA, 21 nt, Artificial
  Synthetic
aaaucuaccuaaagcagcaua

SEQ ID NO: 538 - RNA, 21 nt, Artificial
  Synthetic
aguccuagguuuauuuugcaa

SEQ ID NO: 539 - RNA, 21 nt, Artificial
  Synthetic
ccuagguuuauuuugcagaca

SEQ ID NO: 540 - RNA, 21 nt, Artificial
  Synthetic
ccaaguuauucagccucauaa

SEQ ID NO: 541 - RNA, 21 nt, Artificial
  Synthetic
guuauucagccucauaugaca

SEQ ID NO: 542 - RNA, 21 nt, Artificial
  Synthetic
uuauucagccucauaugacua

SEQ ID NO: 543 - RNA, 21 nt, Artificial
  Synthetic
uauucagccucauaugacuca

SEQ ID NO: 544 - RNA, 21 nt, Artificial
  Synthetic
ucggcuuuaccaaaacaguua

SEQ ID NO: 545 - RNA, 21 nt, Artificial
  Synthetic
ggcuuuaccaaaacaguucaa

SEQ ID NO: 546 - RNA, 21 nt, Artificial
  Synthetic
aaacaguucagagugcacuua

SEQ ID NO: 547 - RNA, 21 nt, Artificial
  Synthetic
agagugcacuuuggcacacaa

SEQ ID NO: 548 - RNA, 21 nt, Artificial
  Synthetic
aacagaacaaucuaaugugua

SEQ ID NO: 549 - RNA, 21 nt, Artificial
  Synthetic
cagaacaaucuaaugugugga

SEQ ID NO: 550 - RNA, 21 nt, Artificial
  Synthetic
uaaugugugguuugguauuca

SEQ ID NO: 551 - RNA, 21 nt, Artificial
  Synthetic
gugugguuugguauuccaaga

SEQ ID NO: 552 - RNA, 21 nt, Artificial
  Synthetic
ugugguuugguauuccaagua

SEQ ID NO: 553 - RNA, 23 nt, Artificial
  Synthetic
ucuuuacaccacacugucgucga

SEQ ID NO: 554 - DNA, 23 bp, Artificial
  Synthetic
ugccuutgaaaguccuuucauga

SEQ ID NO: 555 - RNA, 23 nt, Artificial
  Synthetic
uacauagagaacacccucuuuug

SEQ ID NO: 556 - RNA, 23 nt, Artificial
  Synthetic
uuacauagagaacacccucuuuu

SEQ ID NO: 557 - RNA, 23 nt, Artificial
  Synthetic
uguuuuggagccuacauagagaa

SEQ ID NO: 558 - DNA, 23 bp, Artificial
  Synthetic
ugucactugcucuuuggucuucu

SEQ ID NO: 559 - RNA, 23 nt, Artificial
  Synthetic
ucauuucauaagccucauuguca

SEQ ID NO: 560 - RNA, 23 nt, Artificial
  Synthetic
uaaggcauuucauaagccucauu

SEQ ID NO: 561 - DNA, 23 bp, Artificial
  Synthetic
ucguagtcuugauacccuuccuc

SEQ ID NO: 562 - RNA, 23 nt, Artificial
  Synthetic
uuucguagucuugauacccuucc

SEQ ID NO: 563 - DNA, 23 bp, Artificial
  Synthetic
uguucgtagucuugauacccuuc

SEQ ID NO: 564 - RNA, 23 nt, Artificial
  Synthetic
ugguucguagucuugauacccuu

SEQ ID NO: 565 - RNA, 23 nt, Artificial
  Synthetic
uagguucguagucuugauacccu

SEQ ID NO: 566 - DNA, 23 bp, Artificial
  Synthetic
ucaggutcguagucuugauaccc

SEQ ID NO: 567 - DNA, 23 bp, Artificial
  Synthetic
uucaggtucguagucuugauacc

SEQ ID NO: 568 - RNA, 23 nt, Artificial
  Synthetic
ucuucagguucguagucuugaua

SEQ ID NO: 569 - DNA, 23 bp, Artificial
  Synthetic
uuaggctucagguucguagucuu

SEQ ID NO: 570 - RNA, 23 nt, Artificial
  Synthetic
uuauuucuuaggcuucagguucg

SEQ ID NO: 571 - DNA, 23 bp, Artificial
  Synthetic
uagauatuucuuaggcuucaggu

SEQ ID NO: 572 - RNA, 23 nt, Artificial
  Synthetic
uaucucaagaaacugggagcaaa

SEQ ID NO: 573 - RNA, 23 nt, Artificial
  Synthetic
ugaucucaagaaacugggagcaa

SEQ ID NO: 574 - DNA, 23 bp, Artificial
  Synthetic
uagauctcaagaaacugggagca

SEQ ID NO: 575 - RNA, 23 nt, Artificial
  Synthetic
ucagaucucaagaaacugggagc

SEQ ID NO: 576 - DNA, 23 bp, Artificial
  Synthetic
ugcagatcucaagaaacugggag

SEQ ID NO: 577 - RNA, 23 nt, Artificial
  Synthetic
uucagcagaucucaagaaacugg

SEQ ID NO: 578 - RNA, 23 nt, Artificial
  Synthetic
uugucagcagaucucaagaaacu

SEQ ID NO: 579 - DNA, 23 bp, Artificial
  Synthetic
ugcacatuggaacugagcacuug

SEQ ID NO: 580 - RNA, 23 nt, Artificial
  Synthetic
ugaaaugucaugacugggcacau

SEQ ID NO: 581 - RNA, 23 nt, Artificial
  Synthetic
uuugagaaaugucaugacugggc

SEQ ID NO: 582 - RNA, 23 nt, Artificial
  Synthetic
uuacuucaaucacugcugaugga

SEQ ID NO: 583 - DNA, 23 bp, Artificial
  Synthetic
uauguatucacuucagugaaagg

SEQ ID NO: 584 - RNA, 23 nt, Artificial
  Synthetic
ucauguauucacuucagugaaag

SEQ ID NO: 585 - RNA, 23 nt, Artificial
  Synthetic
uaccauguauucacuucagugaa

SEQ ID NO: 586 - DNA, 23 bp, Artificial
  Synthetic
uuaccatguauucacuucaguga

SEQ ID NO: 587 - RNA, 23 nt, Artificial
  Synthetic
ugcuaccauguauucacuucagu

SEQ ID NO: 588 - RNA, 23 nt, Artificial
  Synthetic
uugcuaccauguauucacuucag

SEQ ID NO: 589 - RNA, 23 nt, Artificial
  Synthetic
ugauugaagccacaaaauccaca

SEQ ID NO: 590 - RNA, 23 nt, Artificial
  Synthetic
uguagucacuuagguguuuuuaa

SEQ ID NO: 591 - DNA, 23 bp, Artificial
  Synthetic
ugguagtcacuuagguguuuuua

SEQ ID NO: 592 - RNA, 23 nt, Artificial
  Synthetic
uugguagucacuuagguguuuuu

SEQ ID NO: 593 - RNA, 23 nt, Artificial
  Synthetic
uuaagugguagucacuuaggugu

SEQ ID NO: 594 - RNA, 23 nt, Artificial
  Synthetic
uuagaaauaagugguagucacuu

SEQ ID NO: 595 - RNA, 23 nt, Artificial
  Synthetic
uuaacaacuucugaacaacagca

SEQ ID NO: 596 - RNA, 23 nt, Artificial
  Synthetic
ucuaacaacuucugaacaacagc

SEQ ID NO: 597 - RNA, 23 nt, Artificial
  Synthetic
uacuaacaacuucugaacaacag

SEQ ID NO: 598 - RNA, 23 nt, Artificial
  Synthetic
uaaucacuaacaacuucugaaca

SEQ ID NO: 599 - RNA, 23 nt, Artificial
  Synthetic
uuagcaaaucacuaacaacuucu

SEQ ID NO: 600 - RNA, 23 nt, Artificial
  Synthetic
ucuuagacaguaucauuaaaaga

SEQ ID NO: 601 - RNA, 23 nt, Artificial
  Synthetic
uucauuauucuuagacaguauca

SEQ ID NO: 602 - RNA, 23 nt, Artificial
  Synthetic
uuaggugcauaguuucaugcuca

SEQ ID NO: 603 - RNA, 23 nt, Artificial
  Synthetic
uuauaggugcauaguuucaugcu

SEQ ID NO: 604 - RNA, 23 nt, Artificial
  Synthetic
uuuaaagugagaugggauaaaaa

SEQ ID NO: 605 - RNA, 23 nt, Artificial
  Synthetic
uauuaaagugagaugggauaaaa

SEQ ID NO: 606 - DNA, 23 bp, Artificial
  Synthetic
uauuautaaagugagaugggaua

SEQ ID NO: 607 - DNA, 23 bp, Artificial
  Synthetic
uuagggtuaauguuccauuuucu

SEQ ID NO: 608 - RNA, 23 nt, Artificial
  Synthetic
uaugugcuaauaugugcuaaugu

SEQ ID NO: 609 - RNA, 23 nt, Artificial
  Synthetic
uuagaucuucccugaaagagaaa

SEQ ID NO: 610 - DNA, 23 bp, Artificial
  Synthetic
uauacutucuacuagugacuuuu

SEQ ID NO: 611 - DNA, 23 bp, Artificial
  Synthetic
uuauactuucuacuagugacuuu

SEQ ID NO: 612 - RNA, 23 nt, Artificial
  Synthetic
uagcaugucuagaauauucuguc

SEQ ID NO: 613 - DNA, 23 bp, Artificial
  Synthetic
uuagcatgucuagaauauucugu

SEQ ID NO: 614 - RNA, 23 nt, Artificial
  Synthetic
ucuagcaugucuagaauauucug

SEQ ID NO: 615 - RNA, 23 nt, Artificial
  Synthetic
uauaaacugcuagcaugucuaga

SEQ ID NO: 616 - RNA, 23 nt, Artificial
  Synthetic
ucuuauagucacucauuccuccu

SEQ ID NO: 617 - DNA, 23 bp, Artificial
  Synthetic
uccuuatagucacucauuccucc

SEQ ID NO: 618 - DNA, 23 bp, Artificial
  Synthetic
uaaccatccuuauagucacucau

SEQ ID NO: 619 - RNA, 23 nt, Artificial
  Synthetic
uaugguaaccauccuuauaguca

SEQ ID NO: 620 - DNA, 23 bp, Artificial
  Synthetic
uuauggtaaccauccuuauaguc

SEQ ID NO: 621 - DNA, 23 bp, Artificial
  Synthetic
uaaguutcuaugguaaccauccu

SEQ ID NO: 622 - RNA, 23 nt, Artificial
  Synthetic
ugcuuagcacucuguaguagucu

SEQ ID NO: 623 - RNA, 23 nt, Artificial
  Synthetic
uaugacacaugcagcuuagcacu

SEQ ID NO: 624 - DNA, 23 bp, Artificial
  Synthetic
uuaagatgacacaugcagcuuag

SEQ ID NO: 625 - RNA, 23 nt, Artificial
  Synthetic
uguaagaugacacaugcagcuua

SEQ ID NO: 626 - DNA, 23 bp, Artificial
  Synthetic
uaaccutccugaaauauacuguu

SEQ ID NO: 627 - RNA, 23 nt, Artificial
  Synthetic
uaugcugcuuuagguagauuuaa

SEQ ID NO: 628 - RNA, 23 nt, Artificial
  Synthetic
uugcaaaauaaaccuaggacugg

SEQ ID NO: 629 - RNA, 23 nt, Artificial
  Synthetic
ugucugcaaaauaaaccuaggac

SEQ ID NO: 630 - RNA, 23 nt, Artificial
  Synthetic
uuaugaggcugaauaacuuggga

SEQ ID NO: 631 - RNA, 23 nt, Artificial
  Synthetic
ugucauaugaggcugaauaacuu

SEQ ID NO: 632 - DNA, 23 bp, Artificial
  Synthetic
uagucataugaggcugaauaacu

SEQ ID NO: 633 - RNA, 23 nt, Artificial
  Synthetic
ugagucauaugaggcugaauaac

SEQ ID NO: 634 - DNA, 23 bp, Artificial
  Synthetic
uaacugtuuugguaaagccgacc

SEQ ID NO: 635 - DNA, 23 bp, Artificial
  Synthetic
uugaactguuuugguaaagccga

SEQ ID NO: 636 - RNA, 23 nt, Artificial
  Synthetic
uaagugcacucugaacuguuuug

SEQ ID NO: 637 - RNA, 23 nt, Artificial
  Synthetic
uugugugccaaagugcacucuga

SEQ ID NO: 638 - DNA, 23 bp, Artificial
  Synthetic
uacacatuagauuguucuguucc

SEQ ID NO: 639 - RNA, 23 nt, Artificial
  Synthetic
uccacacauuagauuguucuguu

SEQ ID NO: 640 - RNA, 23 nt, Artificial
  Synthetic
ugaauaccaaaccacacauuaga

SEQ ID NO: 641 - RNA, 23 nt, Artificial
  Synthetic
ucuuggaauaccaaaccacacau

SEQ ID NO: 642 - RNA, 23 nt, Artificial
  Synthetic
uacuuggaauaccaaaccacaca

SEQ ID NO: 643 - RNA, 23 nt, Artificial
  Synthetic
ucgacgacagugugguguaaagg

SEQ ID NO: 644 - RNA, 23 nt, Artificial
  Synthetic
ucaugaaaggacuuucaaaggcc

SEQ ID NO: 645 - RNA, 23 nt, Artificial
  Synthetic
caaaagaggguguucucuaugua

SEQ ID NO: 646 - RNA, 23 nt, Artificial
  Synthetic
aaaagaggguguucucuauguag

SEQ ID NO: 647 - RNA, 23 nt, Artificial
  Synthetic
uucucuauguaggcuccaaaacc

SEQ ID NO: 648 - RNA, 23 nt, Artificial
  Synthetic
agaagaccaaagagcaagugaca

SEQ ID NO: 649 - RNA, 23 nt, Artificial
  Synthetic
ugacaaugaggcuuaugaaaugc

SEQ ID NO: 650 - RNA, 23 nt, Artificial
  Synthetic
aaugaggcuuaugaaaugccuuc

SEQ ID NO: 651 - RNA, 23 nt, Artificial
  Synthetic
gaggaaggguaucaagacuacga

SEQ ID NO: 652 - RNA, 23 nt, Artificial
  Synthetic
ggaaggguaucaagacuacgaac

SEQ ID NO: 653 - RNA, 23 nt, Artificial
  Synthetic
gaaggguaucaagacuacgaacc

SEQ ID NO: 654 - RNA, 23 nt, Artificial
  Synthetic
aaggguaucaagacuacgaaccu

SEQ ID NO: 655 - RNA, 23 nt, Artificial
  Synthetic
aggguaucaagacuacgaaccug

SEQ ID NO: 656 - RNA, 23 nt, Artificial
  Synthetic
ggguaucaagacuacgaaccuga

SEQ ID NO: 657 - RNA, 23 nt, Artificial
  Synthetic
gguaucaagacuacgaaccugaa

SEQ ID NO: 658 - RNA, 23 nt, Artificial
  Synthetic
uaucaagacuacgaaccugaagc

SEQ ID NO: 659 - RNA, 23 nt, Artificial
  Synthetic
aagacuacgaaccugaagccuaa

SEQ ID NO: 660 - RNA, 23 nt, Artificial
  Synthetic
cgaaccugaagccuaagaaauau

SEQ ID NO: 661 - RNA, 23 nt, Artificial
  Synthetic
accugaagccuaagaaauaucuu

SEQ ID NO: 662 - RNA, 23 nt, Artificial
  Synthetic
uuugcucccaguuucuugagauc

SEQ ID NO: 663 - RNA, 23 nt, Artificial
  Synthetic
uugcucccaguuucuugagaucu

SEQ ID NO: 664 - RNA, 23 nt, Artificial
  Synthetic
ugcucccaguuucuugagaucug

SEQ ID NO: 665 - RNA, 23 nt, Artificial
  Synthetic
gcucccaguuucuugagaucugc

SEQ ID NO: 666 - RNA, 23 nt, Artificial
  Synthetic
cucccaguuucuugagaucugcu

SEQ ID NO: 667 - RNA, 23 nt, Artificial
  Synthetic
ccaguuucuugagaucugcugac

SEQ ID NO: 668 - RNA, 23 nt, Artificial
  Synthetic
aguuucuugagaucugcugacag

SEQ ID NO: 669 - RNA, 23 nt, Artificial
  Synthetic
caagugcucaguuccaaugugcc

SEQ ID NO: 670 - RNA, 23 nt, Artificial
  Synthetic
augugcccagucaugacauuucu

SEQ ID NO: 671 - RNA, 23 nt, Artificial
  Synthetic
gcccagucaugacauuucucaaa

SEQ ID NO: 672 - RNA, 23 nt, Artificial
  Synthetic
uccaucagcagugauugaaguau

SEQ ID NO: 673 - RNA, 23 nt, Artificial
  Synthetic
ccuuucacugaagugaauacaug

SEQ ID NO: 674 - RNA, 23 nt, Artificial
  Synthetic
cuuucacugaagugaauacaugg

SEQ ID NO: 675 - RNA, 23 nt, Artificial
  Synthetic
uucacugaagugaauacauggua

SEQ ID NO: 676 - RNA, 23 nt, Artificial
  Synthetic
ucacugaagugaauacaugguag

SEQ ID NO: 677 - RNA, 23 nt, Artificial
  Synthetic
acugaagugaauacaugguagca

SEQ ID NO: 678 - RNA, 23 nt, Artificial
  Synthetic
cugaagugaauacaugguagcag

SEQ ID NO: 679 - RNA, 23 nt, Artificial
  Synthetic
uguggauuuuguggcuucaaucu

SEQ ID NO: 680 - RNA, 23 nt, Artificial
  Synthetic
uuaaaaacaccuaagugacuacc

SEQ ID NO: 681 - RNA, 23 nt, Artificial
  Synthetic
uaaaaacaccuaagugacuacca

SEQ ID NO: 682 - RNA, 23 nt, Artificial
  Synthetic
aaaaacaccuaagugacuaccac

SEQ ID NO: 683 - RNA, 23 nt, Artificial
  Synthetic
acaccuaagugacuaccacuuau

SEQ ID NO: 684 - RNA, 23 nt, Artificial
  Synthetic
aagugacuaccacuuauuucuaa

SEQ ID NO: 685 - RNA, 23 nt, Artificial
  Synthetic
ugcuguuguucagaaguuguuag

SEQ ID NO: 686 - RNA, 23 nt, Artificial
  Synthetic
gcuguuguucagaaguuguuagu

SEQ ID NO: 687 - RNA, 23 nt, Artificial
  Synthetic
cuguuguucagaaguuguuagug

SEQ ID NO: 688 - RNA, 23 nt, Artificial
  Synthetic
uguucagaaguuguuagugauuu

SEQ ID NO: 689 - RNA, 23 nt, Artificial
  Synthetic
agaaguuguuagugauuugcuau

SEQ ID NO: 690 - RNA, 23 nt, Artificial
  Synthetic
ucuuuuaaugauacugucuaaga

SEQ ID NO: 691 - RNA, 23 nt, Artificial
  Synthetic
ugauacugucuaagaauaaugac

SEQ ID NO: 692 - RNA, 23 nt, Artificial
  Synthetic
ugagcaugaaacuaugcaccuau

SEQ ID NO: 693 - RNA, 23 nt, Artificial
  Synthetic
agcaugaaacuaugcaccuauaa

SEQ ID NO: 694 - RNA, 23 nt, Artificial
  Synthetic
uuuuuaucccaucucacuuuaau

SEQ ID NO: 695 - RNA, 23 nt, Artificial
  Synthetic
uuuuaucccaucucacuuuaaua

SEQ ID NO: 696 - RNA, 23 nt, Artificial
  Synthetic
uaucccaucucacuuuaauaaua

SEQ ID NO: 697 - RNA, 23 nt, Artificial
  Synthetic
agaaaauggaacauuaacccuac

SEQ ID NO: 698 - RNA, 23 nt, Artificial
  Synthetic
acauuagcacauauuagcacauu

SEQ ID NO: 699 - RNA, 23 nt, Artificial
  Synthetic
uuucucuuucagggaagaucuau

SEQ ID NO: 700 - RNA, 23 nt, Artificial
  Synthetic
aaaagucacuaguagaaaguaua

SEQ ID NO: 701 - RNA, 23 nt, Artificial
  Synthetic
aaagucacuaguagaaaguauaa

SEQ ID NO: 702 - RNA, 23 nt, Artificial
  Synthetic
gacagaauauucuagacaugcua

SEQ ID NO: 703 - RNA, 23 nt, Artificial
  Synthetic
acagaauauucuagacaugcuag

SEQ ID NO: 704 - RNA, 23 nt, Artificial
  Synthetic
cagaauauucuagacaugcuagc

SEQ ID NO: 705 - RNA, 23 nt, Artificial
  Synthetic
ucuagacaugcuagcaguuuaua

SEQ ID NO: 706 - RNA, 23 nt, Artificial
  Synthetic
aggaggaaugagugacuauaagg

SEQ ID NO: 707 - RNA, 23 nt, Artificial
  Synthetic
ggaggaaugagugacuauaagga

SEQ ID NO: 708 - RNA, 23 nt, Artificial
  Synthetic
augagugacuauaaggaugguua

SEQ ID NO: 709 - RNA, 23 nt, Artificial
  Synthetic
ugacuauaaggaugguuaccaua

SEQ ID NO: 710 - RNA, 23 nt, Artificial
  Synthetic
gacuauaaggaugguuaccauag

SEQ ID NO: 711 - RNA, 23 nt, Artificial
  Synthetic
aggaugguuaccauagaaacuuc

SEQ ID NO: 712 - RNA, 23 nt, Artificial
  Synthetic
agacuacuacagagugcuaagcu

SEQ ID NO: 713 - RNA, 23 nt, Artificial
  Synthetic
agugcuaagcugcaugugucauc

SEQ ID NO: 714 - RNA, 23 nt, Artificial
  Synthetic
cuaagcugcaugugucaucuuac

SEQ ID NO: 715 - RNA, 23 nt, Artificial
  Synthetic
uaagcugcaugugucaucuuaca

SEQ ID NO: 716 - RNA, 23 nt, Artificial
  Synthetic
aacaguauauuucaggaagguua

SEQ ID NO: 717 - RNA, 23 nt, Artificial
  Synthetic
uuaaaucuaccuaaagcagcaua

SEQ ID NO: 718 - RNA, 23 nt, Artificial
  Synthetic
ccaguccuagguuuauuuugcag

SEQ ID NO: 719 - RNA, 23 nt, Artificial
  Synthetic
guccuagguuuauuuugcagacu

SEQ ID NO: 720 - RNA, 23 nt, Artificial
  Synthetic
ucccaaguuauucagccucauau

SEQ ID NO: 721 - RNA, 23 nt, Artificial
  Synthetic
aaguuauucagccucauaugacu

SEQ ID NO: 722 - RNA, 23 nt, Artificial
  Synthetic
aguuauucagccucauaugacuc

SEQ ID NO: 723 - RNA, 23 nt, Artificial
  Synthetic
guuauucagccucauaugacucc

SEQ ID NO: 724 - RNA, 23 nt, Artificial
  Synthetic
ggucggcuuuaccaaaacaguuc

SEQ ID NO: 725 - RNA, 23 nt, Artificial
  Synthetic
ucggcuuuaccaaaacaguucag

SEQ ID NO: 726 - RNA, 23 nt, Artificial
  Synthetic
caaaacaguucagagugcacuuu

SEQ ID NO: 727 - RNA, 23 nt, Artificial
  Synthetic
ucagagugcacuuuggcacacaa

SEQ ID NO: 728 - RNA, 23 nt, Artificial
  Synthetic
ggaacagaacaaucuaaugugug

SEQ ID NO: 729 - RNA, 23 nt, Artificial
  Synthetic
aacagaacaaucuaauguguggu

SEQ ID NO: 730 - RNA, 23 nt, Artificial
  Synthetic
ucuaaugugugguuugguauucc

SEQ ID NO: 731 - RNA, 23 nt, Artificial
  Synthetic
augugugguuugguauuccaagu

SEQ ID NO: 732 - RNA, 23 nt, Artificial
  Synthetic
ugugugguuugguauuccaagug

SEQ ID NO: 733 - RNA, 21 nt, Artificial
  Synthetic
gacgacagugugguguaaaga

SEQ ID NO: 734 - RNA, 21 nt, Artificial
  Synthetic
augaaaggacuuucaaaggca

SEQ ID NO: 735 - RNA, 21 nt, Artificial
  Synthetic
aaagaggguguucucuaugua

SEQ ID NO: 736 - RNA, 21 nt, Artificial
  Synthetic
aagaggguguucucuauguaa

SEQ ID NO: 737 - RNA, 21 nt, Artificial
  Synthetic
cucuauguaggcuccaaaaca

SEQ ID NO: 738 - RNA, 21 nt, Artificial
  Synthetic
aagaccaaagagcaagugaca

SEQ ID NO: 739 - RNA, 21 nt, Artificial
  Synthetic
acaaugaggcuuaugaaauga

SEQ ID NO: 740 - RNA, 21 nt, Artificial
  Synthetic
ugaggcuuaugaaaugccuua

SEQ ID NO: 741 - RNA, 21 nt, Artificial
  Synthetic
ggaaggguaucaagacuacga

SEQ ID NO: 742 - RNA, 21 nt, Artificial
  Synthetic
aaggguaucaagacuacgaaa

SEQ ID NO: 743 - RNA, 21 nt, Artificial
  Synthetic
aggguaucaagacuacgaaca

SEQ ID NO: 744 - RNA, 21 nt, Artificial
  Synthetic
ggguaucaagacuacgaacca

SEQ ID NO: 745 - RNA, 21 nt, Artificial
  Synthetic
gguaucaagacuacgaaccua

SEQ ID NO: 746 - RNA, 21 nt, Artificial
  Synthetic
guaucaagacuacgaaccuga

SEQ ID NO: 747 - RNA, 21 nt, Artificial
  Synthetic
uaucaagacuacgaaccugaa

SEQ ID NO: 748 - RNA, 21 nt, Artificial
  Synthetic
ucaagacuacgaaccugaaga

SEQ ID NO: 749 - RNA, 21 nt, Artificial
  Synthetic
gacuacgaaccugaagccuaa

SEQ ID NO: 750 - RNA, 21 nt, Artificial
  Synthetic
aaccugaagccuaagaaauaa

SEQ ID NO: 751 - RNA, 21 nt, Artificial
  Synthetic
cugaagccuaagaaauaucua

SEQ ID NO: 752 - RNA, 21 nt, Artificial
  Synthetic
ugcucccaguuucuugagaua

SEQ ID NO: 753 - RNA, 21 nt, Artificial
  Synthetic
gcucccaguuucuugagauca

SEQ ID NO: 754 - RNA, 21 nt, Artificial
  Synthetic
cucccaguuucuugagaucua

SEQ ID NO: 755 - RNA, 21 nt, Artificial
  Synthetic
ucccaguuucuugagaucuga

SEQ ID NO: 756 - RNA, 21 nt, Artificial
  Synthetic
cccaguuucuugagaucugca

SEQ ID NO: 757 - RNA, 21 nt, Artificial
  Synthetic
aguuucuugagaucugcugaa

SEQ ID NO: 758 - RNA, 21 nt, Artificial
  Synthetic
uuucuugagaucugcugacaa

SEQ ID NO: 759 - RNA, 21 nt, Artificial
  Synthetic
agugcucaguuccaaugugca

SEQ ID NO: 760 - RNA, 21 nt, Artificial
  Synthetic
gugcccagucaugacauuuca

SEQ ID NO: 761 - RNA, 21 nt, Artificial
  Synthetic
ccagucaugacauuucucaaa

SEQ ID NO: 762 - RNA, 21 nt, Artificial
  Synthetic
caucagcagugauugaaguaa

SEQ ID NO: 763 - RNA, 21 nt, Artificial
  Synthetic
uuucacugaagugaauacaua

SEQ ID NO: 764 - RNA, 21 nt, Artificial
  Synthetic
uucacugaagugaauacauga

SEQ ID NO: 765 - RNA, 21 nt, Artificial
  Synthetic
cacugaagugaauacauggua

SEQ ID NO: 766 - RNA, 21 nt, Artificial
  Synthetic
acugaagugaauacaugguaa

SEQ ID NO: 767 - RNA, 21 nt, Artificial
  Synthetic
ugaagugaauacaugguagca

SEQ ID NO: 768 - RNA, 21 nt, Artificial
  Synthetic
gaagugaauacaugguagcaa

SEQ ID NO: 769 - RNA, 21 nt, Artificial
  Synthetic
uggauuuuguggcuucaauca

SEQ ID NO: 770 - RNA, 21 nt, Artificial
  Synthetic
aaaaacaccuaagugacuaca

SEQ ID NO: 771 - RNA, 21 nt, Artificial
  Synthetic
aaaacaccuaagugacuacca

SEQ ID NO: 772 - RNA, 21 nt, Artificial
  Synthetic
aaacaccuaagugacuaccaa

SEQ ID NO: 773 - RNA, 21 nt, Artificial
  Synthetic
accuaagugacuaccacuuaa

SEQ ID NO: 774 - RNA, 21 nt, Artificial
  Synthetic
gugacuaccacuuauuucuaa

SEQ ID NO: 775 - RNA, 21 nt, Artificial
  Synthetic
cuguuguucagaaguuguuaa

SEQ ID NO: 776 - RNA, 21 nt, Artificial
  Synthetic
uguuguucagaaguuguuaga

SEQ ID NO: 777 - RNA, 21 nt, Artificial
  Synthetic
guuguucagaaguuguuagua

SEQ ID NO: 778 - RNA, 21 nt, Artificial
  Synthetic
uucagaaguuguuagugauua

SEQ ID NO: 779 - RNA, 21 nt, Artificial
  Synthetic
aaguuguuagugauuugcuaa

SEQ ID NO: 780 - RNA, 21 nt, Artificial
  Synthetic
uuuuaaugauacugucuaaga

SEQ ID NO: 781 - RNA, 21 nt, Artificial
  Synthetic
auacugucuaagaauaaugaa

SEQ ID NO: 782 - RNA, 21 nt, Artificial
  Synthetic
agcaugaaacuaugcaccuaa

SEQ ID NO: 783 - RNA, 21 nt, Artificial
  Synthetic
caugaaacuaugcaccuauaa

SEQ ID NO: 784 - RNA, 21 nt, Artificial
  Synthetic
uuuaucccaucucacuuuaaa

SEQ ID NO: 785 - RNA, 21 nt, Artificial
  Synthetic
uuaucccaucucacuuuaaua

SEQ ID NO: 786 - RNA, 21 nt, Artificial
  Synthetic
ucccaucucacuuuaauaaua

SEQ ID NO: 787 - RNA, 21 nt, Artificial
  Synthetic
aaaauggaacauuaacccuaa

SEQ ID NO: 788 - RNA, 21 nt, Artificial
  Synthetic
auuagcacauauuagcacaua

SEQ ID NO: 789 - RNA, 21 nt, Artificial
  Synthetic
ucucuuucagggaagaucuaa

SEQ ID NO: 790 - RNA, 21 nt, Artificial
  Synthetic
aagucacuaguagaaaguaua

SEQ ID NO: 791 - RNA, 21 nt, Artificial
  Synthetic
agucacuaguagaaaguauaa

SEQ ID NO: 792 - RNA, 21 nt, Artificial
  Synthetic
cagaauauucuagacaugcua

SEQ ID NO: 793 - RNA, 21 nt, Artificial
  Synthetic
agaauauucuagacaugcuaa

SEQ ID NO: 794 - RNA, 21 nt, Artificial
  Synthetic
gaauauucuagacaugcuaga

SEQ ID NO: 795 - RNA, 21 nt, Artificial
  Synthetic
uagacaugcuagcaguuuaua

SEQ ID NO: 796 - RNA, 21 nt, Artificial
  Synthetic
gaggaaugagugacuauaaga

SEQ ID NO: 797 - RNA, 21 nt, Artificial
  Synthetic
aggaaugagugacuauaagga

SEQ ID NO: 798 - RNA, 21 nt, Artificial
  Synthetic
gagugacuauaaggaugguua

SEQ ID NO: 799 - RNA, 21 nt, Artificial
  Synthetic
acuauaaggaugguuaccaua

SEQ ID NO: 800 - RNA, 21 nt, Artificial
  Synthetic
cuauaaggaugguuaccauaa

SEQ ID NO: 801 - RNA, 21 nt, Artificial
  Synthetic
gaugguuaccauagaaacuua

SEQ ID NO: 802 - RNA, 21 nt, Artificial
  Synthetic
acuacuacagagugcuaagca

SEQ ID NO: 803 - RNA, 21 nt, Artificial
  Synthetic
ugcuaagcugcaugugucaua

SEQ ID NO: 804 - RNA, 21 nt, Artificial
  Synthetic
aagcugcaugugucaucuuaa

SEQ ID NO: 805 - RNA, 21 nt, Artificial
  Synthetic
agcugcaugugucaucuuaca

SEQ ID NO: 806 - RNA, 21 nt, Artificial
  Synthetic
caguauauuucaggaagguua

SEQ ID NO: 807 - RNA, 21 nt, Artificial
  Synthetic
aaaucuaccuaaagcagcaua

SEQ ID NO: 808 - RNA, 21 nt, Artificial
  Synthetic
aguccuagguuuauuuugcaa

SEQ ID NO: 809 - RNA, 21 nt, Artificial
  Synthetic
ccuagguuuauuuugcagaca

SEQ ID NO: 810 - RNA, 21 nt, Artificial
  Synthetic
ccaaguuauucagccucauaa

SEQ ID NO: 811 - RNA, 21 nt, Artificial
  Synthetic
guuauucagccucauaugaca

SEQ ID NO: 812 - RNA, 21 nt, Artificial
  Synthetic
uuauucagccucauaugacua

SEQ ID NO: 813 - RNA, 21 nt, Artificial
  Synthetic
uauucagccucauaugacuca

SEQ ID NO: 814 - RNA, 21 nt, Artificial
  Synthetic
ucggcuuuaccaaaacaguua

SEQ ID NO: 815 - RNA, 21 nt, Artificial
  Synthetic
ggcuuuaccaaaacaguucaa

SEQ ID NO: 816 - RNA, 21 nt, Artificial
  Synthetic
aaacaguucagagugcacuua

SEQ ID NO: 817 - RNA, 21 nt, Artificial
  Synthetic
agagugcacuuuggcacacaa

SEQ ID NO: 818 - RNA, 21 nt, Artificial
  Synthetic
aacagaacaaucuaaugugua

SEQ ID NO: 819 - RNA, 21 nt, Artificial
  Synthetic
cagaacaaucuaaugugugga

SEQ ID NO: 820 - RNA, 21 nt, Artificial
  Synthetic
uaaugugugguuugguauuca

SEQ ID NO: 821 - RNA, 21 nt, Artificial
  Synthetic
gugugguuugguauuccaaga

SEQ ID NO: 822 - RNA, 21 nt, Artificial
  Synthetic
ugugguuugguauuccaagua

SEQ ID NO: 823 - RNA, 23 nt, Artificial
  Synthetic
ucuuuacaccacacugucgucga

SEQ ID NO: 824 - DNA, 23 bp, Artificial
  Synthetic
ugccuutgaaaguccuuucauga

SEQ ID NO: 825 - RNA, 23 nt, Artificial
  Synthetic
uacauagagaacacccucuuuug

SEQ ID NO: 826 - RNA, 23 nt, Artificial
  Synthetic
uuacauagagaacacccucuuuu

SEQ ID NO: 827 - RNA, 23 nt, Artificial
  Synthetic
uguuuuggagccuacauagagaa

SEQ ID NO: 828 - DNA, 23 bp, Artificial
  Synthetic
ugucactugcucuuuggucuucu

SEQ ID NO: 829 - RNA, 23 nt, Artificial
  Synthetic
ucauuucauaagccucauuguca

SEQ ID NO: 830 - RNA, 23 nt, Artificial
  Synthetic
uaaggcauuucauaagccucauu

SEQ ID NO: 831 - DNA, 23 bp, Artificial
  Synthetic
ucguagtcuugauacccuuccuc

SEQ ID NO: 832 - RNA, 23 nt, Artificial
  Synthetic
uuucguagucuugauacccuucc

SEQ ID NO: 833 - DNA, 23 bp, Artificial
  Synthetic
uguucgtagucuugauacccuuc

SEQ ID NO: 834 - RNA, 23 nt, Artificial
  Synthetic
ugguucguagucuugauacccuu

SEQ ID NO: 835 - RNA, 23 nt, Artificial
  Synthetic
uagguucguagucuugauacccu

SEQ ID NO: 836 - DNA, 23 bp, Artificial
  Synthetic
ucaggutcguagucuugauaccc

SEQ ID NO: 837 - DNA, 23 bp, Artificial
  Synthetic
uucaggtucguagucuugauacc

SEQ ID NO: 838 - RNA, 23 nt, Artificial
  Synthetic
ucuucagguucguagucuugaua

SEQ ID NO: 839 - DNA, 23 bp, Artificial
  Synthetic
uuaggctucagguucguagucuu

SEQ ID NO: 840 - RNA, 23 nt, Artificial
  Synthetic
uuauuucuuaggcuucagguucg

SEQ ID NO: 841 - DNA, 23 bp, Artificial
  Synthetic
uagauatuucuuaggcuucaggu

SEQ ID NO: 842 - RNA, 23 nt, Artificial
  Synthetic
uaucucaagaaacugggagcaaa

SEQ ID NO: 843 - RNA, 23 nt, Artificial
  Synthetic
ugaucucaagaaacugggagcaa

SEQ ID NO: 844 - DNA, 23 bp, Artificial
  Synthetic
uagauctcaagaaacugggagca

SEQ ID NO: 845 - RNA, 23 nt, Artificial
  Synthetic
ucagaucucaagaaacugggagc

SEQ ID NO: 846 - DNA, 23 bp, Artificial
  Synthetic
ugcagatcucaagaaacugggag

SEQ ID NO: 847 - RNA, 23 nt, Artificial
  Synthetic
uucagcagaucucaagaaacugg

SEQ ID NO: 848 - RNA, 23 nt, Artificial
  Synthetic
uugucagcagaucucaagaaacu

SEQ ID NO: 849 - DNA, 23 bp, Artificial
  Synthetic
ugcacatuggaacugagcacuug

SEQ ID NO: 850 - RNA, 23 nt, Artificial
  Synthetic
ugaaaugucaugacugggcacau

SEQ ID NO: 851 - RNA, 23 nt, Artificial
  Synthetic
uuugagaaaugucaugacugggc

SEQ ID NO: 852 - RNA, 23 nt, Artificial
  Synthetic
uuacuucaaucacugcugaugga

SEQ ID NO: 853 - DNA, 23 bp, Artificial
  Synthetic
uauguatucacuucagugaaagg

SEQ ID NO: 854 - RNA, 23 nt, Artificial
  Synthetic
ucauguauucacuucagugaaag

SEQ ID NO: 855 - RNA, 23 nt, Artificial
  Synthetic
uaccauguauucacuucagugaa

SEQ ID NO: 856 - DNA, 23 bp, Artificial
  Synthetic
uuaccatguauucacuucaguga

SEQ ID NO: 857 - RNA, 23 nt, Artificial
  Synthetic
ugcuaccauguauucacuucagu

SEQ ID NO: 858 - RNA, 23 nt, Artificial
  Synthetic
uugcuaccauguauucacuucag

SEQ ID NO: 859 - RNA, 23 nt, Artificial
  Synthetic
ugauugaagccacaaaauccaca

SEQ ID NO: 860 - RNA, 23 nt, Artificial
  Synthetic
uguagucacuuagguguuuuuaa

SEQ ID NO: 861 - DNA, 23 bp, Artificial
  Synthetic
ugguagtcacuuagguguuuuua

SEQ ID NO: 862 - RNA, 23 nt, Artificial
  Synthetic
uugguagucacuuagguguuuuu

SEQ ID NO: 863 - RNA, 23 nt, Artificial
  Synthetic
uuaagugguagucacuuaggugu

SEQ ID NO: 864 - RNA, 23 nt, Artificial
  Synthetic
uuagaaauaagugguagucacuu

SEQ ID NO: 865 - RNA, 23 nt, Artificial
  Synthetic
uuaacaacuucugaacaacagca

SEQ ID NO: 866 - RNA, 23 nt, Artificial
  Synthetic
ucuaacaacuucugaacaacagc

SEQ ID NO: 867 - RNA, 23 nt, Artificial
  Synthetic
uacuaacaacuucugaacaacag

SEQ ID NO: 868 - RNA, 23 nt, Artificial
  Synthetic
uaaucacuaacaacuucugaaca

SEQ ID NO: 869 - RNA, 23 nt, Artificial
  Synthetic
uuagcaaaucacuaacaacuucu

SEQ ID NO: 870 - RNA, 23 nt, Artificial
  Synthetic
ucuuagacaguaucauuaaaaga

SEQ ID NO: 871 - RNA, 23 nt, Artificial
  Synthetic
uucauuauucuuagacaguauca

SEQ ID NO: 872 - RNA, 23 nt, Artificial
  Synthetic
uuaggugcauaguuucaugcuca

SEQ ID NO: 873 - RNA, 23 nt, Artificial
  Synthetic
uuauaggugcauaguuucaugcu

SEQ ID NO: 874 - RNA, 23 nt, Artificial
  Synthetic
uuuaaagugagaugggauaaaaa

SEQ ID NO: 875 - RNA, 23 nt, Artificial
  Synthetic
uauuaaagugagaugggauaaaa

SEQ ID NO: 876 - DNA, 23 bp, Artificial
  Synthetic
uauuautaaagugagaugggaua

SEQ ID NO: 877 - DNA, 23 bp, Artificial
  Synthetic
uuagggtuaauguuccauuuucu

SEQ ID NO: 878 - RNA, 23 nt, Artificial
  Synthetic
uaugugcuaauaugugcuaaugu

SEQ ID NO: 879 - RNA, 23 nt, Artificial
  Synthetic
uuagaucuucccugaaagagaaa

SEQ ID NO: 880 - DNA, 23 bp, Artificial
  Synthetic
uauacutucuacuagugacuuuu

SEQ ID NO: 881 - DNA, 23 bp, Artificial
  Synthetic
uuauactuucuacuagugacuuu

SEQ ID NO: 882 - RNA, 23 nt, Artificial
  Synthetic
uagcaugucuagaauauucuguc

SEQ ID NO: 883 - DNA, 23 bp, Artificial
  Synthetic
uuagcatgucuagaauauucugu

SEQ ID NO: 884 - RNA, 23 nt, Artificial
  Synthetic
ucuagcaugucuagaauauucug

SEQ ID NO: 885 - RNA, 23 nt, Artificial
  Synthetic
uauaaacugcuagcaugucuaga

SEQ ID NO: 886 - RNA, 23 nt, Artificial
  Synthetic
ucuuauagucacucauuccuccu

SEQ ID NO: 887 - DNA, 23 bp, Artificial
  Synthetic
uccuuatagucacucauuccucc

SEQ ID NO: 888 - DNA, 23 bp, Artificial
  Synthetic
uaaccatccuuauagucacucau

SEQ ID NO: 889 - RNA, 23 nt, Artificial
  Synthetic
uaugguaaccauccuuauaguca

SEQ ID NO: 890 - DNA, 23 bp, Artificial
  Synthetic
uuauggtaaccauccuuauaguc

SEQ ID NO: 891 - DNA, 23 bp, Artificial
  Synthetic
uaaguutcuaugguaaccauccu

SEQ ID NO: 892 - RNA, 23 nt, Artificial
  Synthetic
ugcuuagcacucuguaguagucu

SEQ ID NO: 893 - RNA, 23 nt, Artificial
  Synthetic
uaugacacaugcagcuuagcacu

SEQ ID NO: 894 - DNA, 23 bp, Artificial
  Synthetic
uuaagatgacacaugcagcuuag

SEQ ID NO: 895 - RNA, 23 nt, Artificial
  Synthetic
uguaagaugacacaugcagcuua

SEQ ID NO: 896 - DNA, 23 bp, Artificial
  Synthetic
uaaccutccugaaauauacuguu

SEQ ID NO: 897 - RNA, 23 nt, Artificial
  Synthetic
uaugcugcuuuagguagauuuaa

SEQ ID NO: 898 - RNA, 23 nt, Artificial
  Synthetic
uugcaaaauaaaccuaggacugg

SEQ ID NO: 899 - RNA, 23 nt, Artificial
  Synthetic
ugucugcaaaauaaaccuaggac

SEQ ID NO: 900 - RNA, 23 nt, Artificial
  Synthetic
uuaugaggcugaauaacuuggga

SEQ ID NO: 901 - RNA, 23 nt, Artificial
  Synthetic
ugucauaugaggcugaauaacuu

SEQ ID NO: 902 - DNA, 23 bp, Artificial
  Synthetic
uagucataugaggcugaauaacu

SEQ ID NO: 903 - RNA, 23 nt, Artificial
  Synthetic
ugagucauaugaggcugaauaac

SEQ ID NO: 904 - DNA, 23 bp, Artificial
  Synthetic
uaacugtuuugguaaagccgacc

SEQ ID NO: 905 - DNA, 23 bp, Artificial
  Synthetic
uugaactguuuugguaaagccga

SEQ ID NO: 906 - RNA, 23 nt, Artificial
  Synthetic
uaagugcacucugaacuguuuug

SEQ ID NO: 907 - RNA, 23 nt, Artificial
  Synthetic
uugugugccaaagugcacucuga

SEQ ID NO: 908 - DNA, 23 bp, Artificial
  Synthetic
uacacatuagauuguucuguucc

SEQ ID NO: 909 - RNA, 23 nt, Artificial
  Synthetic
uccacacauuagauuguucuguu

SEQ ID NO: 910 - RNA, 23 nt, Artificial
  Synthetic
ugaauaccaaaccacacauuaga

SEQ ID NO: 911 - RNA, 23 nt, Artificial
  Synthetic
ucuuggaauaccaaaccacacau

SEQ ID NO: 912 - RNA, 23 nt, Artificial
  Synthetic
uacuuggaauaccaaaccacaca

SEQ ID NO: 913 - RNA, 21 nt, Artificial
  Synthetic
augaaaggacuuucaaaggca

SEQ ID NO: 914 - RNA, 21 nt, Artificial
  Synthetic
aaagaggguguucucuaugua

SEQ ID NO: 915 - RNA, 21 nt, Artificial
  Synthetic
aagaggguguucucuauguaa

SEQ ID NO: 916 - RNA, 21 nt, Artificial
  Synthetic
ugaggcuuaugaaaugccuua

SEQ ID NO: 917 - RNA, 21 nt, Artificial
  Synthetic
aaggguaucaagacuacgaaa

SEQ ID NO: 918 - RNA, 21 nt, Artificial
  Synthetic
aggguaucaagacuacgaaca

SEQ ID NO: 919 - RNA, 21 nt, Artificial
  Synthetic
uaucaagacuacgaaccugaa

SEQ ID NO: 920 - RNA, 21 nt, Artificial
  Synthetic
ucaagacuacgaaccugaaga

SEQ ID NO: 921 - RNA, 21 nt, Artificial
  Synthetic
aaccugaagccuaagaaauaa

SEQ ID NO: 922 - RNA, 21 nt, Artificial
  Synthetic
cugaagccuaagaaauaucua

SEQ ID NO: 923 - RNA, 21 nt, Artificial
  Synthetic
ucccaguuucuugagaucuga

SEQ ID NO: 924 - RNA, 21 nt, Artificial
  Synthetic
aguuucuugagaucugcugaa

SEQ ID NO: 925 - RNA, 21 nt, Artificial
  Synthetic
uuucuugagaucugcugacaa

SEQ ID NO: 926 - RNA, 21 nt, Artificial
  Synthetic
ccagucaugacauuucucaaa

SEQ ID NO: 927 - RNA, 21 nt, Artificial
  Synthetic
caucagcagugauugaaguaa

SEQ ID NO: 928 - RNA, 21 nt, Artificial
  Synthetic
uuucacugaagugaauacaua

SEQ ID NO: 929 - RNA, 21 nt, Artificial
  Synthetic
uucacugaagugaauacauga

SEQ ID NO: 930 - RNA, 21 nt, Artificial
  Synthetic
acugaagugaauacaugguaa

SEQ ID NO: 931 - RNA, 21 nt, Artificial
  Synthetic
accuaagugacuaccacuuaa

SEQ ID NO: 932 - RNA, 21 nt, Artificial
  Synthetic
gugacuaccacuuauuucuaa

SEQ ID NO: 933 - RNA, 21 nt, Artificial
  Synthetic
ugacuaccacuuauuucuaaa

SEQ ID NO: 934 - RNA, 21 nt, Artificial
  Synthetic
aaacaccuaagugacuaccaa

SEQ ID NO: 935 - RNA, 21 nt, Artificial
  Synthetic
caccuaagugacuaccacuua

SEQ ID NO: 936 - RNA, 21 nt, Artificial
  Synthetic
cuguuguucagaaguuguuaa

SEQ ID NO: 937 - RNA, 21 nt, Artificial
  Synthetic
uguuguucagaaguuguuaga

SEQ ID NO: 938 - RNA, 21 nt, Artificial
  Synthetic
guuguucagaaguuguuagua

SEQ ID NO: 939 - RNA, 21 nt, Artificial
  Synthetic
uuuuaaugauacugucuaaga

SEQ ID NO: 940 - RNA, 21 nt, Artificial
  Synthetic
auacugucuaagaauaaugaa

SEQ ID NO: 941 - RNA, 21 nt, Artificial
  Synthetic
agcaugaaacuaugcaccuaa

SEQ ID NO: 942 - RNA, 21 nt, Artificial
  Synthetic
caugaaacuaugcaccuauaa

SEQ ID NO: 943 - RNA, 21 nt, Artificial
  Synthetic
uuuaucccaucucacuuuaaa

SEQ ID NO: 944 - RNA, 21 nt, Artificial
  Synthetic
uuaucccaucucacuuuaaua

SEQ ID NO: 945 - RNA, 21 nt, Artificial
  Synthetic
ucccaucucacuuuaauaaua

SEQ ID NO: 946 - RNA, 21 nt, Artificial
  Synthetic
aaaauggaacauuaacccuaa

SEQ ID NO: 947 - RNA, 21 nt, Artificial
  Synthetic
ucucuuucagggaagaucuaa

SEQ ID NO: 948 - RNA, 21 nt, Artificial
  Synthetic
aagucacuaguagaaaguaua

SEQ ID NO: 949 - RNA, 21 nt, Artificial
  Synthetic
agucacuaguagaaaguauaa

SEQ ID NO: 950 - RNA, 21 nt, Artificial
  Synthetic
cacuaguagaaaguauaauua

SEQ ID NO: 951 - RNA, 21 nt, Artificial
  Synthetic
cagaauauucuagacaugcua

SEQ ID NO: 952 - RNA, 21 nt, Artificial
  Synthetic
agaauauucuagacaugcuaa

SEQ ID NO: 953 - RNA, 21 nt, Artificial
  Synthetic
uagacaugcuagcaguuuaua

SEQ ID NO: 954 - RNA, 21 nt, Artificial
  Synthetic
gaugguuaccauagaaacuua

SEQ ID NO: 955 - RNA, 21 nt, Artificial
  Synthetic
aagcugcaugugucaucuuaa

SEQ ID NO: 956 - RNA, 21 nt, Artificial
  Synthetic
agcugcaugugucaucuuaca

SEQ ID NO: 957 - RNA, 21 nt, Artificial
  Synthetic
aguccuagguuuauuuugcaa

SEQ ID NO: 958 - RNA, 21 nt, Artificial
  Synthetic
ucggcuuuaccaaaacaguua

SEQ ID NO: 959 - RNA, 21 nt, Artificial
  Synthetic
ggcuuuaccaaaacaguucaa

SEQ ID NO: 960 - RNA, 21 nt, Artificial
  Synthetic
uaaugugugguuugguauuca

SEQ ID NO: 961 - RNA, 21 nt, Artificial
  Synthetic
auacaucuuuagccauggaua

SEQ ID NO: 962 - RNA, 21 nt, Artificial
  Synthetic
ggauguguucaugaaaggaca

SEQ ID NO: 963 - RNA, 21 nt, Artificial
  Synthetic
auguguucaugaaaggacuua

SEQ ID NO: 964 - RNA, 21 nt, Artificial
  Synthetic
uguucaugaaaggacuuucaa

SEQ ID NO: 965 - RNA, 21 nt, Artificial
  Synthetic
gaguccucuauguagguucca

SEQ ID NO: 966 - RNA, 21 nt, Artificial
  Synthetic
cucuauguagguuccaaaaca

SEQ ID NO: 967 - RNA, 21 nt, Artificial
  Synthetic
ugguucauggagugacaacaa

SEQ ID NO: 968 - RNA, 21 nt, Artificial
  Synthetic
ucauggagugacaacagugga

SEQ ID NO: 969 - RNA, 21 nt, Artificial
  Synthetic
ugaggcuuaugaaaugccuua

SEQ ID NO: 970 - RNA, 21 nt, Artificial
  Synthetic
ggaauccuggaagacaugcca

SEQ ID NO: 971 - RNA, 21 nt, Artificial
  Synthetic
agugaggcuuaugaaaugcca

SEQ ID NO: 972 - RNA, 21 nt, Artificial
  Synthetic
aggcuuaugaaaugccuucaa

SEQ ID NO: 973 - RNA, 21 nt, Artificial
  Synthetic
ggcuuaugaaaugccuucaga

SEQ ID NO: 974 - RNA, 21 nt, Artificial
  Synthetic
augccuucagaggaaggcuaa

SEQ ID NO: 975 - RNA, 21 nt, Artificial
  Synthetic
ugccuucagaggaaggcuaca

SEQ ID NO: 976 - RNA, 21 nt, Artificial
  Synthetic
ggaaggcuaccaagacuauga

SEQ ID NO: 977 - RNA, 21 nt, Artificial
  Synthetic
gaaggcuaccaagacuaugaa

SEQ ID NO: 978 - RNA, 21 nt, Artificial
  Synthetic
aaggcuaccaagacuaugaga

SEQ ID NO: 979 - RNA, 21 nt, Artificial
  Synthetic
aggcuaccaagacuaugagca

SEQ ID NO: 980 - RNA, 21 nt, Artificial
  Synthetic
acuaugagccugaagccuaaa

SEQ ID NO: 981 - RNA, 21 nt, Artificial
  Synthetic
gcucuuccauggcguacaaga

SEQ ID NO: 982 - RNA, 21 nt, Artificial
  Synthetic
cucuuccauggcguacaagua

SEQ ID NO: 983 - RNA, 21 nt, Artificial
  Synthetic
ucuuccauggcguacaaguga

SEQ ID NO: 984 - RNA, 21 nt, Artificial
  Synthetic
uuccauggcguacaagugcua

SEQ ID NO: 985 - RNA, 21 nt, Artificial
  Synthetic
uccauggcguacaagugcuca

SEQ ID NO: 986 - RNA, 21 nt, Artificial
  Synthetic
cauggcguacaagugcucaga

SEQ ID NO: 987 - RNA, 21 nt, Artificial
  Synthetic
ugugcccagucaugaccuuua

SEQ ID NO: 988 - RNA, 21 nt, Artificial
  Synthetic
accuuuucucaaagcuguaca

SEQ ID NO: 989 - RNA, 21 nt, Artificial
  Synthetic
uuuucucaaagcuguacagua

SEQ ID NO: 990 - RNA, 21 nt, Artificial
  Synthetic
ucuuccaucagcagugaucga

SEQ ID NO: 991 - RNA, 21 nt, Artificial
  Synthetic
cuguggauauuguuguggcua

SEQ ID NO: 992 - RNA, 21 nt, Artificial
  Synthetic
aaaacaccuaagugacuacca

SEQ ID NO: 993 - RNA, 21 nt, Artificial
  Synthetic
gaaacuuaaaacaccuaagua

SEQ ID NO: 994 - RNA, 21 nt, Artificial
  Synthetic
uaaaacaccuaagugacuaca

SEQ ID NO: 995 - RNA, 21 nt, Artificial
  Synthetic
auuaugugagcaugagacuaa

SEQ ID NO: 996 - RNA, 21 nt, Artificial
  Synthetic
augugagcaugagacuaugca

SEQ ID NO: 997 - RNA, 21 nt, Artificial
  Synthetic
gugagcaugagacuaugcaca

SEQ ID NO: 998 - RNA, 21 nt, Artificial
  Synthetic
ugagcaugagacuaugcacca

SEQ ID NO: 999 - RNA, 21 nt, Artificial
  Synthetic
gagcaugagacuaugcaccua

SEQ ID NO: 1000 - RNA, 21 nt, Artificial
  Synthetic
agcaugagacuaugcaccuaa

SEQ ID NO: 1001 - RNA, 21 nt, Artificial
  Synthetic
gcaugagacuaugcaccuaua

SEQ ID NO: 1002 - RNA, 21 nt, Artificial
  Synthetic
ugagacuaugcaccuauaaaa

SEQ ID NO: 1003 - RNA, 21 nt, Artificial
  Synthetic
gagacuaugcaccuauaaaua

SEQ ID NO: 1004 - RNA, 21 nt, Artificial
  Synthetic
auguguuuuauuaacuuguga

SEQ ID NO: 1005 - RNA, 23 nt, Artificial
  Synthetic
ugccuuugaaaguccuuucauga

SEQ ID NO: 1006 - RNA, 23 nt, Artificial
  Synthetic
uacauagagaacacccucuuuug

SEQ ID NO: 1007 - RNA, 23 nt, Artificial
  Synthetic
uuacauagagaacacccucuuuu

SEQ ID NO: 1008 - RNA, 23 nt, Artificial
  Synthetic
uaaggcauuucauaagccucauu

SEQ ID NO: 1009 - RNA, 23 nt, Artificial
  Synthetic
uuucguagucuugauacccuucc

SEQ ID NO: 1010 - RNA, 23 nt, Artificial
  Synthetic
uguucguagucuugauacccuuc

SEQ ID NO: 1011 - RNA, 23 nt, Artificial
  Synthetic
uucagguucguagucuugauacc

SEQ ID NO: 1012 - RNA, 23 nt, Artificial
  Synthetic
ucuucagguucguagucuugaua

SEQ ID NO: 1013 - RNA, 23 nt, Artificial
  Synthetic
uuauuucuuaggcuucagguucg

SEQ ID NO: 1014 - RNA, 23 nt, Artificial
  Synthetic
uagauauuucuuaggcuucaggu

SEQ ID NO: 1015 - RNA, 23 nt, Artificial
  Synthetic
ucagaucucaagaaacugggagc

SEQ ID NO: 1016 - RNA, 23 nt, Artificial
  Synthetic
uucagcagaucucaagaaacugg

SEQ ID NO: 1017 - RNA, 23 nt, Artificial
  Synthetic
uugucagcagaucucaagaaacu

SEQ ID NO: 1018 - RNA, 23 nt, Artificial
  Synthetic
uuugagaaaugucaugacugggc

SEQ ID NO: 1019 - RNA, 23 nt, Artificial
  Synthetic
uuacuucaaucacugcugaugga

SEQ ID NO: 1020 - RNA, 23 nt, Artificial
  Synthetic
uauguauucacuucagugaaagg

SEQ ID NO: 1021 - RNA, 23 nt, Artificial
  Synthetic
ucauguauucacuucagugaaag

SEQ ID NO: 1022 - RNA, 23 nt, Artificial
  Synthetic
uuaccauguauucacuucaguga

SEQ ID NO: 1023 - RNA, 23 nt, Artificial
  Synthetic
uuaagugguagucacuuaggugu

SEQ ID NO: 1024 - RNA, 23 nt, Artificial
  Synthetic
uuagaaauaagugguagucacuu

SEQ ID NO: 1025 - RNA, 23 nt, Artificial
  Synthetic
uuuagaaauaagugguagucacu

SEQ ID NO: 1026 - RNA, 23 nt, Artificial
  Synthetic
uugguagucacuuagguguuuuu

SEQ ID NO: 1027 - RNA, 23 nt, Artificial
  Synthetic
uaagugguagucacuuagguguu

SEQ ID NO: 1028 - RNA, 23 nt, Artificial
  Synthetic
uuaacaacuucugaacaacagca

SEQ ID NO: 1029 - RNA, 23 nt, Artificial
  Synthetic
ucuaacaacuucugaacaacagc

SEQ ID NO: 1030 - RNA, 23 nt, Artificial
  Synthetic
uacuaacaacuucugaacaacag

SEQ ID NO: 1031 - RNA, 23 nt, Artificial
  Synthetic
ucuuagacaguaucauuaaaaga

SEQ ID NO: 1032 - RNA, 23 nt, Artificial
  Synthetic
uucauuauucuuagacaguauca

SEQ ID NO: 1033 - RNA, 23 nt, Artificial
  Synthetic
uuaggugcauaguuucaugcuca

SEQ ID NO: 1034 - RNA, 23 nt, Artificial
  Synthetic
uuauaggugcauaguuucaugcu

SEQ ID NO: 1035 - RNA, 23 nt, Artificial
  Synthetic
uuuaaagugagaugggauaaaaa

SEQ ID NO: 1036 - RNA, 23 nt, Artificial
  Synthetic
uauuaaagugagaugggauaaaa

SEQ ID NO: 1037 - RNA, 23 nt, Artificial
  Synthetic
uauuauuaaagugagaugggaua

SEQ ID NO: 1038 - RNA, 23 nt, Artificial
  Synthetic
uuaggguuaauguuccauuuucu

SEQ ID NO: 1039 - RNA, 23 nt, Artificial
  Synthetic
uuagaucuucccugaaagagaaa

SEQ ID NO: 1040 - RNA, 23 nt, Artificial
  Synthetic
uauacuuucuacuagugacuuuu

SEQ ID NO: 1041 - RNA, 23 nt, Artificial
  Synthetic
uuauacuuucuacuagugacuuu

SEQ ID NO: 1042 - RNA, 23 nt, Artificial
  Synthetic
uaauuauacuuucuacuagugac

SEQ ID NO: 1043 - RNA, 23 nt, Artificial
  Synthetic
uagcaugucuagaauauucuguc

SEQ ID NO: 1044 - RNA, 23 nt, Artificial
  Synthetic
uuagcaugucuagaauauucugu

SEQ ID NO: 1045 - RNA, 23 nt, Artificial
  Synthetic
uauaaacugcuagcaugucuaga

SEQ ID NO: 1046 - RNA, 23 nt, Artificial
  Synthetic
uaaguuucuaugguaaccauccu

SEQ ID NO: 1047 - RNA, 23 nt, Artificial
  Synthetic
uuaagaugacacaugcagcuuag

SEQ ID NO: 1048 - RNA, 23 nt, Artificial
  Synthetic
uguaagaugacacaugcagcuua

SEQ ID NO: 1049 - RNA, 23 nt, Artificial
  Synthetic
uugcaaaauaaaccuaggacugg

SEQ ID NO: 1050 - RNA, 23 nt, Artificial
  Synthetic
uaacuguuuugguaaagccgacc

SEQ ID NO: 1051 - RNA, 23 nt, Artificial
  Synthetic
uugaacuguuuugguaaagccga

SEQ ID NO: 1052 - RNA, 23 nt, Artificial
  Synthetic
ugaauaccaaaccacacauuaga

SEQ ID NO: 1053 - RNA, 23 nt, Artificial
  Synthetic
uauccauggcuaaagauguauuu

SEQ ID NO: 1054 - RNA, 23 nt, Artificial
  Synthetic
uguccuuucaugaacacauccau

SEQ ID NO: 1055 - RNA, 23 nt, Artificial
  Synthetic
uaaguccuuucaugaacacaucc

SEQ ID NO: 1056 - RNA, 23 nt, Artificial
  Synthetic
uugaaaguccuuucaugaacaca

SEQ ID NO: 1057 - RNA, 23 nt, Artificial
  Synthetic
uggaaccuacauagaggacuccc

SEQ ID NO: 1058 - RNA, 23 nt, Artificial
  Synthetic
uguuuuggaaccuacauagagga

SEQ ID NO: 1059 - RNA, 23 nt, Artificial
  Synthetic
uuguugucacuccaugaaccacu

SEQ ID NO: 1060 - RNA, 23 nt, Artificial
  Synthetic
uccacuguugucacuccaugaac

SEQ ID NO: 1061 - RNA, 23 nt, Artificial
  Synthetic
uaaggcauuucauaagccucacu

SEQ ID NO: 1062 - RNA, 23 nt, Artificial
  Synthetic
uggcaugucuuccaggauuccuu

SEQ ID NO: 1063 - RNA, 23 nt, Artificial
  Synthetic
uggcauuucauaagccucacugc

SEQ ID NO: 1064 - RNA, 23 nt, Artificial
  Synthetic
uugaaggcauuucauaagccuca

SEQ ID NO: 1065 - RNA, 23 nt, Artificial
  Synthetic
ucugaaggcauuucauaagccuc

SEQ ID NO: 1066 - RNA, 23 nt, Artificial
  Synthetic
uuagccuuccucugaaggcauuu

SEQ ID NO: 1067 - RNA, 23 nt, Artificial
  Synthetic
uguagccuuccucugaaggcauu

SEQ ID NO: 1068 - RNA, 23 nt, Artificial
  Synthetic
ucauagucuugguagccuuccuc

SEQ ID NO: 1069 - RNA, 23 nt, Artificial
  Synthetic
uucauagucuugguagccuuccu

SEQ ID NO: 1070 - RNA, 23 nt, Artificial
  Synthetic
ucucauagucuugguagccuucc

SEQ ID NO: 1071 - RNA, 23 nt, Artificial
  Synthetic
ugcucauagucuugguagccuuc

SEQ ID NO: 1072 - RNA, 23 nt, Artificial
  Synthetic
uuuaggcuucaggcucauagucu

SEQ ID NO: 1073 - RNA, 23 nt, Artificial
  Synthetic
ucuuguacgccauggaagagcag

SEQ ID NO: 1074 - RNA, 23 nt, Artificial
  Synthetic
uacuuguacgccauggaagagca

SEQ ID NO: 1075 - RNA, 23 nt, Artificial
  Synthetic
ucacuuguacgccauggaagagc

SEQ ID NO: 1076 - RNA, 23 nt, Artificial
  Synthetic
uagcacuuguacgccauggaaga

SEQ ID NO: 1077 - RNA, 23 nt, Artificial
  Synthetic
ugagcacuuguacgccauggaag

SEQ ID NO: 1078 - RNA, 23 nt, Artificial
  Synthetic
ucugagcacuuguacgccaugga

SEQ ID NO: 1079 - RNA, 23 nt, Artificial
  Synthetic
uaaaggucaugacugggcacauu

SEQ ID NO: 1080 - RNA, 23 nt, Artificial
  Synthetic
uguacagcuuugagaaaagguca

SEQ ID NO: 1081 - RNA, 23 nt, Artificial
  Synthetic
uacuguacagcuuugagaaaagg

SEQ ID NO: 1082 - RNA, 23 nt, Artificial
  Synthetic
ucgaucacugcugauggaagacu

SEQ ID NO: 1083 - RNA, 23 nt, Artificial
  Synthetic
uagccacaacaauauccacagca

SEQ ID NO: 1084 - RNA, 23 nt, Artificial
  Synthetic
ugguagucacuuagguguuuuaa

SEQ ID NO: 1085 - RNA, 23 nt, Artificial
  Synthetic
uacuuagguguuuuaaguuucuu

SEQ ID NO: 1086 - RNA, 23 nt, Artificial
  Synthetic
uguagucacuuagguguuuuaag

SEQ ID NO: 1087 - RNA, 23 nt, Artificial
  Synthetic
uuagucucaugcucacauaauuu

SEQ ID NO: 1088 - RNA, 23 nt, Artificial
  Synthetic
ugcauagucucaugcucacauaa

SEQ ID NO: 1089 - RNA, 23 nt, Artificial
  Synthetic
ugugcauagucucaugcucacau

SEQ ID NO: 1090 - RNA, 23 nt, Artificial
  Synthetic
uggugcauagucucaugcucaca

SEQ ID NO: 1091 - RNA, 23 nt, Artificial
  Synthetic
uaggugcauagucucaugcucac

SEQ ID NO: 1092 - RNA, 23 nt, Artificial
  Synthetic
uuaggugcauagucucaugcuca

SEQ ID NO: 1093 - RNA, 23 nt, Artificial
  Synthetic
uauaggugcauagucucaugcuc

SEQ ID NO: 1094 - RNA, 23 nt, Artificial
  Synthetic
uuuuauaggugcauagucucaug

SEQ ID NO: 1095 - RNA, 23 nt, Artificial
  Synthetic
uauuuauaggugcauagucucau

SEQ ID NO: 1096 - RNA, 23 nt, Artificial
  Synthetic
ucacaaguuaauaaaacacauca

SEQ ID NO: 1097 - RNA, 23 nt, Artificial
  Synthetic
ucaugaaaggacuuucaaaggcc

SEQ ID NO: 1098 - RNA, 23 nt, Artificial
  Synthetic
caaaagaggguguucucuaugua

SEQ ID NO: 1099 - RNA, 23 nt, Artificial
  Synthetic
aaaagaggguguucucuauguag

SEQ ID NO: 1100 - RNA, 23 nt, Artificial
  Synthetic
aaugaggcuuaugaaaugccuuc

SEQ ID NO: 1101 - RNA, 23 nt, Artificial
  Synthetic
ggaaggguaucaagacuacgaac

SEQ ID NO: 1102 - RNA, 23 nt, Artificial
  Synthetic
gaaggguaucaagacuacgaacc

SEQ ID NO: 1103 - RNA, 23 nt, Artificial
  Synthetic
gguaucaagacuacgaaccugaa

SEQ ID NO: 1104 - RNA, 23 nt, Artificial
  Synthetic
uaucaagacuacgaaccugaagc

SEQ ID NO: 1105 - RNA, 23 nt, Artificial
  Synthetic
cgaaccugaagccuaagaaauau

SEQ ID NO: 1106 - RNA, 23 nt, Artificial
  Synthetic
accugaagccuaagaaauaucuu

SEQ ID NO: 1107 - RNA, 23 nt, Artificial
  Synthetic
gcucccaguuucuugagaucugc

SEQ ID NO: 1108 - RNA, 23 nt, Artificial
  Synthetic
ccaguuucuugagaucugcugac

SEQ ID NO: 1109 - RNA, 23 nt, Artificial
  Synthetic
aguuucuugagaucugcugacag

SEQ ID NO: 1110 - RNA, 23 nt, Artificial
  Synthetic
gcccagucaugacauuucucaaa

SEQ ID NO: 1111 - RNA, 23 nt, Artificial
  Synthetic
uccaucagcagugauugaaguau

SEQ ID NO: 1112 - RNA, 23 nt, Artificial
  Synthetic
ccuuucacugaagugaauacaug

SEQ ID NO: 1113 - RNA, 23 nt, Artificial
  Synthetic
cuuucacugaagugaauacaugg

SEQ ID NO: 1114 - RNA, 23 nt, Artificial
  Synthetic
ucacugaagugaauacaugguag

SEQ ID NO: 1115 - RNA, 23 nt, Artificial
  Synthetic
acaccuaagugacuaccacuuau

SEQ ID NO: 1116 - RNA, 23 nt, Artificial
  Synthetic
aagugacuaccacuuauuucuaa

SEQ ID NO: 1117 - RNA, 23 nt, Artificial
  Synthetic
agugacuaccacuuauuucuaaa

SEQ ID NO: 1118 - RNA, 23 nt, Artificial
  Synthetic
aaaaacaccuaagugacuaccac

SEQ ID NO: 1119 - RNA, 23 nt, Artificial
  Synthetic
aacaccuaagugacuaccacuua

SEQ ID NO: 1120 - RNA, 23 nt, Artificial
  Synthetic
ugcuguuguucagaaguuguuag

SEQ ID NO: 1121 - RNA, 23 nt, Artificial
  Synthetic
gcuguuguucagaaguuguuagu

SEQ ID NO: 1122 - RNA, 23 nt, Artificial
  Synthetic
cuguuguucagaaguuguuagug

SEQ ID NO: 1123 - RNA, 23 nt, Artificial
  Synthetic
ucuuuuaaugauacugucuaaga

SEQ ID NO: 1124 - RNA, 23 nt, Artificial
  Synthetic
ugauacugucuaagaauaaugac

SEQ ID NO: 1125 - RNA, 23 nt, Artificial
  Synthetic
ugagcaugaaacuaugcaccuau

SEQ ID NO: 1126 - RNA, 23 nt, Artificial
  Synthetic
agcaugaaacuaugcaccuauaa

SEQ ID NO: 1127 - RNA, 23 nt, Artificial
  Synthetic
uuuuuaucccaucucacuuuaau

SEQ ID NO: 1128 - RNA, 23 nt, Artificial
  Synthetic
uuuuaucccaucucacuuuaaua

SEQ ID NO: 1129 - RNA, 23 nt, Artificial
  Synthetic
uaucccaucucacuuuaauaaua

SEQ ID NO: 1130 - RNA, 23 nt, Artificial
  Synthetic
agaaaauggaacauuaacccuac

SEQ ID NO: 1131 - RNA, 23 nt, Artificial
  Synthetic
uuucucuuucagggaagaucuau

SEQ ID NO: 1132 - RNA, 23 nt, Artificial
  Synthetic
aaaagucacuaguagaaaguaua

SEQ ID NO: 1133 - RNA, 23 nt, Artificial
  Synthetic
aaagucacuaguagaaaguauaa

SEQ ID NO: 1134 - RNA, 23 nt, Artificial
  Synthetic
gucacuaguagaaaguauaauuu

SEQ ID NO: 1135 - RNA, 23 nt, Artificial
  Synthetic
gacagaauauucuagacaugcua

SEQ ID NO: 1136 - RNA, 23 nt, Artificial
  Synthetic
acagaauauucuagacaugcuag

SEQ ID NO: 1137 - RNA, 23 nt, Artificial
  Synthetic
ucuagacaugcuagcaguuuaua

SEQ ID NO: 1138 - RNA, 23 nt, Artificial
  Synthetic
aggaugguuaccauagaaacuuc

SEQ ID NO: 1139 - RNA, 23 nt, Artificial
  Synthetic
cuaagcugcaugugucaucuuac

SEQ ID NO: 1140 - RNA, 23 nt, Artificial
  Synthetic
uaagcugcaugugucaucuuaca

SEQ ID NO: 1141 - RNA, 23 nt, Artificial
  Synthetic
ccaguccuagguuuauuuugcag

SEQ ID NO: 1142 - RNA, 23 nt, Artificial
  Synthetic
ggucggcuuuaccaaaacaguuc

SEQ ID NO: 1143 - RNA, 23 nt, Artificial
  Synthetic
ucggcuuuaccaaaacaguucag

SEQ ID NO: 1144 - RNA, 23 nt, Artificial
  Synthetic
ucuaaugugugguuugguauucc

SEQ ID NO: 1145 - RNA, 23 nt, Artificial
  Synthetic
aaauacaucuuuagccauggaug

SEQ ID NO: 1146 - RNA, 23 nt, Artificial
  Synthetic
auggauguguucaugaaaggacu

SEQ ID NO: 1147 - RNA, 23 nt, Artificial
  Synthetic
ggauguguucaugaaaggacuuu

SEQ ID NO: 1148 - RNA, 23 nt, Artificial
  Synthetic
uguguucaugaaaggacuuucaa

SEQ ID NO: 1149 - RNA, 23 nt, Artificial
  Synthetic
gggaguccucuauguagguucca

SEQ ID NO: 1150 - RNA, 23 nt, Artificial
  Synthetic
uccucuauguagguuccaaaacu

SEQ ID NO: 1151 - RNA, 23 nt, Artificial
  Synthetic
agugguucauggagugacaacag

SEQ ID NO: 1152 - RNA, 23 nt, Artificial
  Synthetic
guucauggagugacaacaguggc

SEQ ID NO: 1153 - RNA, 23 nt, Artificial
  Synthetic
aaggaauccuggaagacaugccu

SEQ ID NO: 1154 - RNA, 23 nt, Artificial
  Synthetic
gcagugaggcuuaugaaaugccu

SEQ ID NO: 1155 - RNA, 23 nt, Artificial
  Synthetic
ugaggcuuaugaaaugccuucag

SEQ ID NO: 1156 - RNA, 23 nt, Artificial
  Synthetic
gaggcuuaugaaaugccuucaga

SEQ ID NO: 1157 - RNA, 23 nt, Artificial
  Synthetic
aaaugccuucagaggaaggcuac

SEQ ID NO: 1158 - RNA, 23 nt, Artificial
  Synthetic
aaugccuucagaggaaggcuacc

SEQ ID NO: 1159 - RNA, 23 nt, Artificial
  Synthetic
gaggaaggcuaccaagacuauga

SEQ ID NO: 1160 - RNA, 23 nt, Artificial
  Synthetic
aggaaggcuaccaagacuaugag

SEQ ID NO: 1161 - RNA, 23 nt, Artificial
  Synthetic
ggaaggcuaccaagacuaugagc

SEQ ID NO: 1162 - RNA, 23 nt, Artificial
  Synthetic
gaaggcuaccaagacuaugagcc

SEQ ID NO: 1163 - RNA, 23 nt, Artificial
  Synthetic
agacuaugagccugaagccuaag

SEQ ID NO: 1164 - RNA, 23 nt, Artificial
  Synthetic
cugcucuuccauggcguacaagu

SEQ ID NO: 1165 - RNA, 23 nt, Artificial
  Synthetic
ugcucuuccauggcguacaagug

SEQ ID NO: 1166 - RNA, 23 nt, Artificial
  Synthetic
gcucuuccauggcguacaagugc

SEQ ID NO: 1167 - RNA, 23 nt, Artificial
  Synthetic
ucuuccauggcguacaagugcuc

SEQ ID NO: 1168 - RNA, 23 nt, Artificial
  Synthetic
cuuccauggcguacaagugcuca

SEQ ID NO: 1169 - RNA, 23 nt, Artificial
  Synthetic
uccauggcguacaagugcucagu

SEQ ID NO: 1170 - RNA, 23 nt, Artificial
  Synthetic
aaugugcccagucaugaccuuuu

SEQ ID NO: 1171 - RNA, 23 nt, Artificial
  Synthetic
ugaccuuuucucaaagcuguaca

SEQ ID NO: 1172 - RNA, 23 nt, Artificial
  Synthetic
ccuuuucucaaagcuguacagug

SEQ ID NO: 1173 - RNA, 23 nt, Artificial
  Synthetic
agucuuccaucagcagugaucgg

SEQ ID NO: 1174 - RNA, 23 nt, Artificial
  Synthetic
ugcuguggauauuguuguggcuu

SEQ ID NO: 1175 - RNA, 23 nt, Artificial
  Synthetic
aagaaacuuaaaacaccuaagug

SEQ ID NO: 1176 - RNA, 23 nt, Artificial
  Synthetic
cuuaaaacaccuaagugacuacc

SEQ ID NO: 1177 - RNA, 23 nt, Artificial
  Synthetic
aaauuaugugagcaugagacuau

SEQ ID NO: 1178 - RNA, 23 nt, Artificial
  Synthetic
uuaugugagcaugagacuaugca

SEQ ID NO: 1179 - RNA, 23 nt, Artificial
  Synthetic
augugagcaugagacuaugcacc

SEQ ID NO: 1180 - RNA, 23 nt, Artificial
  Synthetic
ugugagcaugagacuaugcaccu

SEQ ID NO: 1181 - RNA, 23 nt, Artificial
  Synthetic
gugagcaugagacuaugcaccua

SEQ ID NO: 1182 - RNA, 23 nt, Artificial
  Synthetic
ugagcaugagacuaugcaccuau

SEQ ID NO: 1183 - RNA, 23 nt, Artificial
  Synthetic
gagcaugagacuaugcaccuaua

SEQ ID NO: 1184 - RNA, 23 nt, Artificial
  Synthetic
caugagacuaugcaccuauaaau

SEQ ID NO: 1185 - RNA, 23 nt, Artificial
  Synthetic
augagacuaugcaccuauaaaua

SEQ ID NO: 1186 - RNA, 23 nt, Artificial
  Synthetic
ugauguguuuuauuaacuugugu

SEQ ID NO: 1187 - RNA, 21 nt, Artificial
  Synthetic
augaaaggacuuucaaaggca

SEQ ID NO: 1188 - RNA, 21 nt, Artificial
  Synthetic
aaagaggguguucucuaugua

SEQ ID NO: 1189 - RNA, 21 nt, Artificial
  Synthetic
aagaggguguucucuauguaa

SEQ ID NO: 1190 - RNA, 21 nt, Artificial
  Synthetic
ugaggcuuaugaaaugccuua

SEQ ID NO: 1191 - RNA, 21 nt, Artificial
  Synthetic
aaggguaucaagacuacgaaa

SEQ ID NO: 1192 - RNA, 21 nt, Artificial
  Synthetic
aggguaucaagacuacgaaca

SEQ ID NO: 1193 - RNA, 21 nt, Artificial
  Synthetic
uaucaagacuacgaaccugaa

SEQ ID NO: 1194 - RNA, 21 nt, Artificial
  Synthetic
ucaagacuacgaaccugaaga

SEQ ID NO: 1195 - RNA, 21 nt, Artificial
  Synthetic
aaccugaagccuaagaaauaa

SEQ ID NO: 1196 - RNA, 21 nt, Artificial
  Synthetic
cugaagccuaagaaauaucua

SEQ ID NO: 1197 - RNA, 21 nt, Artificial
  Synthetic
ucccaguuucuugagaucuga

SEQ ID NO: 1198 - RNA, 21 nt, Artificial
  Synthetic
aguuucuugagaucugcugaa

SEQ ID NO: 1199 - RNA, 21 nt, Artificial
  Synthetic
uuucuugagaucugcugacaa

SEQ ID NO: 1200 - RNA, 21 nt, Artificial
  Synthetic
ccagucaugacauuucucaaa

SEQ ID NO: 1201 - RNA, 21 nt, Artificial
  Synthetic
caucagcagugauugaaguaa

SEQ ID NO: 1202 - RNA, 21 nt, Artificial
  Synthetic
uuucacugaagugaauacaua

SEQ ID NO: 1203 - RNA, 21 nt, Artificial
  Synthetic
uucacugaagugaauacauga

SEQ ID NO: 1204 - RNA, 21 nt, Artificial
  Synthetic
acugaagugaauacaugguaa

SEQ ID NO: 1205 - RNA, 21 nt, Artificial
  Synthetic
accuaagugacuaccacuuaa

SEQ ID NO: 1206 - RNA, 21 nt, Artificial
  Synthetic
gugacuaccacuuauuucuaa

SEQ ID NO: 1207 - RNA, 21 nt, Artificial
  Synthetic
ugacuaccacuuauuucuaaa

SEQ ID NO: 1208 - RNA, 21 nt, Artificial
  Synthetic
aaacaccuaagugacuaccaa

SEQ ID NO: 1209 - RNA, 21 nt, Artificial
  Synthetic
caccuaagugacuaccacuua

SEQ ID NO: 1210 - RNA, 21 nt, Artificial
  Synthetic
cuguuguucagaaguuguuaa

SEQ ID NO: 1211 - RNA, 21 nt, Artificial
  Synthetic
uguuguucagaaguuguuaga

SEQ ID NO: 1212 - RNA, 21 nt, Artificial
  Synthetic
guuguucagaaguuguuagua

SEQ ID NO: 1213 - RNA, 21 nt, Artificial
  Synthetic
uuuuaaugauacugucuaaga

SEQ ID NO: 1214 - RNA, 21 nt, Artificial
  Synthetic
auacugucuaagaauaaugaa

SEQ ID NO: 1215 - RNA, 21 nt, Artificial
  Synthetic
agcaugaaacuaugcaccuaa

SEQ ID NO: 1216 - RNA, 21 nt, Artificial
  Synthetic
caugaaacuaugcaccuauaa

SEQ ID NO: 1217 - RNA, 21 nt, Artificial
  Synthetic
uuuaucccaucucacuuuaaa

SEQ ID NO: 1218 - RNA, 21 nt, Artificial
  Synthetic
uuaucccaucucacuuuaaua

SEQ ID NO: 1219 - RNA, 21 nt, Artificial
  Synthetic
ucccaucucacuuuaauaaua

SEQ ID NO: 1220 - RNA, 21 nt, Artificial
  Synthetic
aaaauggaacauuaacccuaa

SEQ ID NO: 1221 - RNA, 21 nt, Artificial
  Synthetic
ucucuuucagggaagaucuaa

SEQ ID NO: 1222 - RNA, 21 nt, Artificial
  Synthetic
aagucacuaguagaaaguaua

SEQ ID NO: 1223 - RNA, 21 nt, Artificial
  Synthetic
agucacuaguagaaaguauaa

SEQ ID NO: 1224 - RNA, 21 nt, Artificial
  Synthetic
cacuaguagaaaguauaauua

SEQ ID NO: 1225 - RNA, 21 nt, Artificial
  Synthetic
cagaauauucuagacaugcua

SEQ ID NO: 1226 - RNA, 21 nt, Artificial
  Synthetic
agaauauucuagacaugcuaa

SEQ ID NO: 1227 - RNA, 21 nt, Artificial
  Synthetic
uagacaugcuagcaguuuaua

SEQ ID NO: 1228 - RNA, 21 nt, Artificial
  Synthetic
gaugguuaccauagaaacuua

SEQ ID NO: 1229 - RNA, 21 nt, Artificial
  Synthetic
aagcugcaugugucaucuuaa

SEQ ID NO: 1230 - RNA, 21 nt, Artificial
  Synthetic
agcugcaugugucaucuuaca

SEQ ID NO: 1231 - RNA, 21 nt, Artificial
  Synthetic
aguccuagguuuauuuugcaa

SEQ ID NO: 1232 - RNA, 21 nt, Artificial
  Synthetic
ucggcuuuaccaaaacaguua

SEQ ID NO: 1233 - RNA, 21 nt, Artificial
  Synthetic
ggcuuuaccaaaacaguucaa

SEQ ID NO: 1234 - RNA, 21 nt, Artificial
  Synthetic
uaaugugugguuugguauuca

SEQ ID NO: 1235 - RNA, 21 nt, Artificial
  Synthetic
auacaucuuuagccauggaua

SEQ ID NO: 1236 - RNA, 21 nt, Artificial
  Synthetic
ggauguguucaugaaaggaca

SEQ ID NO: 1237 - RNA, 21 nt, Artificial
  Synthetic
auguguucaugaaaggacuua

SEQ ID NO: 1238 - RNA, 21 nt, Artificial
  Synthetic
uguucaugaaaggacuuucaa

SEQ ID NO: 1239 - RNA, 21 nt, Artificial
  Synthetic
gaguccucuauguagguucca

SEQ ID NO: 1240 - RNA, 21 nt, Artificial
  Synthetic
cucuauguagguuccaaaaca

SEQ ID NO: 1241 - RNA, 21 nt, Artificial
  Synthetic
ugguucauggagugacaacaa

SEQ ID NO: 1242 - RNA, 21 nt, Artificial
  Synthetic
ucauggagugacaacagugga

SEQ ID NO: 1243 - RNA, 21 nt, Artificial
  Synthetic
ugaggcuuaugaaaugccuua

SEQ ID NO: 1244 - RNA, 21 nt, Artificial
  Synthetic
ggaauccuggaagacaugcca

SEQ ID NO: 1245 - RNA, 21 nt, Artificial
  Synthetic
agugaggcuuaugaaaugcca

SEQ ID NO: 1246 - RNA, 21 nt, Artificial
  Synthetic
aggcuuaugaaaugccuucaa

SEQ ID NO: 1247 - RNA, 21 nt, Artificial
  Synthetic
ggcuuaugaaaugccuucaga

SEQ ID NO: 1248 - RNA, 21 nt, Artificial
  Synthetic
augccuucagaggaaggcuaa

SEQ ID NO: 1249 - RNA, 21 nt, Artificial
  Synthetic
ugccuucagaggaaggcuaca

SEQ ID NO: 1250 - RNA, 21 nt, Artificial
  Synthetic
ggaaggcuaccaagacuauga

SEQ ID NO: 1251 - RNA, 21 nt, Artificial
  Synthetic
gaaggcuaccaagacuaugaa

SEQ ID NO: 1252 - RNA, 21 nt, Artificial
  Synthetic
aaggcuaccaagacuaugaga

SEQ ID NO: 1253 - RNA, 21 nt, Artificial
  Synthetic
aggcuaccaagacuaugagca

SEQ ID NO: 1254 - RNA, 21 nt, Artificial
  Synthetic
acuaugagccugaagccuaaa

SEQ ID NO: 1255 - RNA, 21 nt, Artificial
  Synthetic
gcucuuccauggcguacaaga

SEQ ID NO: 1256 - RNA, 21 nt, Artificial
  Synthetic
cucuuccauggcguacaagua

SEQ ID NO: 1257 - RNA, 21 nt, Artificial
  Synthetic
ucuuccauggcguacaaguga

SEQ ID NO: 1258 - RNA, 21 nt, Artificial
  Synthetic
uuccauggcguacaagugcua

SEQ ID NO: 1259 - RNA, 21 nt, Artificial
  Synthetic
uccauggcguacaagugcuca

SEQ ID NO: 1260 - RNA, 21 nt, Artificial
  Synthetic
cauggcguacaagugcucaga

SEQ ID NO: 1261 - RNA, 21 nt, Artificial
  Synthetic
ugugcccagucaugaccuuua

SEQ ID NO: 1262 - RNA, 21 nt, Artificial
  Synthetic
accuuuucucaaagcuguaca

SEQ ID NO: 1263 - RNA, 21 nt, Artificial
  Synthetic
uuuucucaaagcuguacagua

SEQ ID NO: 1264 - RNA, 21 nt, Artificial
  Synthetic
ucuuccaucagcagugaucga

SEQ ID NO: 1265 - RNA, 21 nt, Artificial
  Synthetic
cuguggauauuguuguggcua

SEQ ID NO: 1266 - RNA, 21 nt, Artificial
  Synthetic
aaaacaccuaagugacuacca

SEQ ID NO: 1267 - RNA, 21 nt, Artificial
  Synthetic
gaaacuuaaaacaccuaagua

SEQ ID NO: 1268 - RNA, 21 nt, Artificial
  Synthetic
uaaaacaccuaagugacuaca

SEQ ID NO: 1269 - RNA, 21 nt, Artificial
  Synthetic
auuaugugagcaugagacuaa

SEQ ID NO: 1270 - RNA, 21 nt, Artificial
  Synthetic
augugagcaugagacuaugca

SEQ ID NO: 1271 - RNA, 21 nt, Artificial
  Synthetic
gugagcaugagacuaugcaca

SEQ ID NO: 1272 - RNA, 21 nt, Artificial
  Synthetic
ugagcaugagacuaugcacca

SEQ ID NO: 1273 - RNA, 21 nt, Artificial
  Synthetic
gagcaugagacuaugcaccua

SEQ ID NO: 1274 - RNA, 21 nt, Artificial
  Synthetic
agcaugagacuaugcaccuaa

SEQ ID NO: 1275 - RNA, 21 nt, Artificial
  Synthetic
gcaugagacuaugcaccuaua

SEQ ID NO: 1276 - RNA, 21 nt, Artificial
  Synthetic
ugagacuaugcaccuauaaaa

SEQ ID NO: 1277 - RNA, 21 nt, Artificial
  Synthetic
gagacuaugcaccuauaaaua

SEQ ID NO: 1278 - RNA, 21 nt, Artificial
  Synthetic
auguguuuuauuaacuuguga

SEQ ID NO: 1279 - RNA, 23 nt, Artificial
  Synthetic
ugccuuugaaaguccuuucauga

SEQ ID NO: 1280 - RNA, 23 nt, Artificial
  Synthetic
uacauagagaacacccucuuuug

SEQ ID NO: 1281 - RNA, 23 nt, Artificial
  Synthetic
uuacauagagaacacccucuuuu

SEQ ID NO: 1282 - RNA, 23 nt, Artificial
  Synthetic
uaaggcauuucauaagccucauu

SEQ ID NO: 1283 - RNA, 23 nt, Artificial
  Synthetic
uuucguagucuugauacccuucc

SEQ ID NO: 1284 - RNA, 23 nt, Artificial
  Synthetic
uguucguagucuugauacccuuc

SEQ ID NO: 1285 - RNA, 23 nt, Artificial
  Synthetic
uucagguucguagucuugauacc

SEQ ID NO: 1286 - RNA, 23 nt, Artificial
  Synthetic
ucuucagguucguagucuugaua

SEQ ID NO: 1287 - RNA, 23 nt, Artificial
  Synthetic
uuauuucuuaggcuucagguucg

SEQ ID NO: 1288 - RNA, 23 nt, Artificial
  Synthetic
uagauauuucuuaggcuucaggu

SEQ ID NO: 1289 - RNA, 23 nt, Artificial
  Synthetic
ucagaucucaagaaacugggagc

SEQ ID NO: 1290 - RNA, 23 nt, Artificial
  Synthetic
uucagcagaucucaagaaacugg

SEQ ID NO: 1291 - RNA, 23 nt, Artificial
  Synthetic
uugucagcagaucucaagaaacu

SEQ ID NO: 1292 - RNA, 23 nt, Artificial
  Synthetic
uuugagaaaugucaugacugggc

SEQ ID NO: 1293 - RNA, 23 nt, Artificial
  Synthetic
uuacuucaaucacugcugaugga

SEQ ID NO: 1294 - RNA, 23 nt, Artificial
  Synthetic
uauguauucacuucagugaaagg

SEQ ID NO: 1295 - RNA, 23 nt, Artificial
  Synthetic
ucauguauucacuucagugaaag

SEQ ID NO: 1296 - RNA, 23 nt, Artificial
  Synthetic
uuaccauguauucacuucaguga

SEQ ID NO: 1297 - RNA, 23 nt, Artificial
  Synthetic
uuaagugguagucacuuaggugu

SEQ ID NO: 1298 - RNA, 23 nt, Artificial
  Synthetic
uuagaaauaagugguagucacuu

SEQ ID NO: 1299 - RNA, 23 nt, Artificial
  Synthetic
uuuagaaauaagugguagucacu

SEQ ID NO: 1300 - RNA, 23 nt, Artificial
  Synthetic
uugguagucacuuagguguuuuu

SEQ ID NO: 1301 - RNA, 23 nt, Artificial
  Synthetic
uaagugguagucacuuagguguu

SEQ ID NO: 1302 - RNA, 23 nt, Artificial
  Synthetic
uuaacaacuucugaacaacagca

SEQ ID NO: 1303 - RNA, 23 nt, Artificial
  Synthetic
ucuaacaacuucugaacaacagc

SEQ ID NO: 1304 - RNA, 23 nt, Artificial
  Synthetic
uacuaacaacuucugaacaacag

SEQ ID NO: 1305 - RNA, 23 nt, Artificial
  Synthetic
ucuuagacaguaucauuaaaaga

SEQ ID NO: 1306 - RNA, 23 nt, Artificial
  Synthetic
uucauuauucuuagacaguauca

SEQ ID NO: 1307 - RNA, 23 nt, Artificial
  Synthetic
uuaggugcauaguuucaugcuca

SEQ ID NO: 1308 - RNA, 23 nt, Artificial
  Synthetic
uuauaggugcauaguuucaugcu

SEQ ID NO: 1309 - RNA, 23 nt, Artificial
  Synthetic
uuuaaagugagaugggauaaaaa

SEQ ID NO: 1310 - RNA, 23 nt, Artificial
  Synthetic
uauuaaagugagaugggauaaaa

SEQ ID NO: 1311 - RNA, 23 nt, Artificial
  Synthetic
uauuauuaaagugagaugggaua

SEQ ID NO: 1312 - RNA, 23 nt, Artificial
  Synthetic
uuaggguuaauguuccauuuucu

SEQ ID NO: 1313 - RNA, 23 nt, Artificial
  Synthetic
uuagaucuucccugaaagagaaa

SEQ ID NO: 1314 - RNA, 23 nt, Artificial
  Synthetic
uauacuuucuacuagugacuuuu

SEQ ID NO: 1315 - RNA, 23 nt, Artificial
  Synthetic
uuauacuuucuacuagugacuuu

SEQ ID NO: 1316 - RNA, 23 nt, Artificial
  Synthetic
uaauuauacuuucuacuagugac

SEQ ID NO: 1317 - RNA, 23 nt, Artificial
  Synthetic
uagcaugucuagaauauucuguc

SEQ ID NO: 1318 - RNA, 23 nt, Artificial
  Synthetic
uuagcaugucuagaauauucugu

SEQ ID NO: 1319 - RNA, 23 nt, Artificial
  Synthetic
uauaaacugcuagcaugucuaga

SEQ ID NO: 1320 - RNA, 23 nt, Artificial
  Synthetic
uaaguuucuaugguaaccauccu

SEQ ID NO: 1321 - RNA, 23 nt, Artificial
  Synthetic
uuaagaugacacaugcagcuuag

SEQ ID NO: 1322 - RNA, 23 nt, Artificial
  Synthetic
uguaagaugacacaugcagcuua

SEQ ID NO: 1323 - RNA, 23 nt, Artificial
  Synthetic
uugcaaaauaaaccuaggacugg

SEQ ID NO: 1324 - RNA, 23 nt, Artificial
  Synthetic
uaacuguuuugguaaagccgacc

SEQ ID NO: 1325 - RNA, 23 nt, Artificial
  Synthetic
uugaacuguuuugguaaagccga

SEQ ID NO: 1326 - RNA, 23 nt, Artificial
  Synthetic
ugaauaccaaaccacacauuaga

SEQ ID NO: 1327 - RNA, 23 nt, Artificial
  Synthetic
uauccauggcuaaagauguauuu

SEQ ID NO: 1328 - RNA, 23 nt, Artificial
  Synthetic
uguccuuucaugaacacauccau

SEQ ID NO: 1329 - RNA, 23 nt, Artificial
  Synthetic
uaaguccuuucaugaacacaucc

SEQ ID NO: 1330 - RNA, 23 nt, Artificial
  Synthetic
uugaaaguccuuucaugaacaca

SEQ ID NO: 1331 - RNA, 23 nt, Artificial
  Synthetic
uggaaccuacauagaggacuccc

SEQ ID NO: 1332 - RNA, 23 nt, Artificial
  Synthetic
uguuuuggaaccuacauagagga

SEQ ID NO: 1333 - RNA, 23 nt, Artificial
  Synthetic
uuguugucacuccaugaaccacu

SEQ ID NO: 1334 - RNA, 23 nt, Artificial
  Synthetic
uccacuguugucacuccaugaac

SEQ ID NO: 1335 - RNA, 23 nt, Artificial
  Synthetic
uaaggcauuucauaagccucacu

SEQ ID NO: 1336 - RNA, 23 nt, Artificial
  Synthetic
uggcaugucuuccaggauuccuu

SEQ ID NO: 1337 - RNA, 23 nt, Artificial
  Synthetic
uggcauuucauaagccucacugc

SEQ ID NO: 1338 - RNA, 23 nt, Artificial
  Synthetic
uugaaggcauuucauaagccuca

SEQ ID NO: 1339 - RNA, 23 nt, Artificial
  Synthetic
ucugaaggcauuucauaagccuc

SEQ ID NO: 1340 - RNA, 23 nt, Artificial
  Synthetic
uuagccuuccucugaaggcauuu

SEQ ID NO: 1341 - RNA, 23 nt, Artificial
  Synthetic
uguagccuuccucugaaggcauu

SEQ ID NO: 1342 - RNA, 23 nt, Artificial
  Synthetic
ucauagucuugguagccuuccuc

SEQ ID NO: 1343 - RNA, 23 nt, Artificial
  Synthetic
uucauagucuugguagccuuccu

SEQ ID NO: 1344 - RNA, 23 nt, Artificial
  Synthetic
ucucauagucuugguagccuucc

SEQ ID NO: 1345 - RNA, 23 nt, Artificial
  Synthetic
ugcucauagucuugguagccuuc

SEQ ID NO: 1346 - RNA, 23 nt, Artificial
  Synthetic
uuuaggcuucaggcucauagucu

SEQ ID NO: 1347 - RNA, 23 nt, Artificial
  Synthetic
ucuuguacgccauggaagagcag

SEQ ID NO: 1348 - RNA, 23 nt, Artificial
  Synthetic
uacuuguacgccauggaagagca

SEQ ID NO: 1349 - RNA, 23 nt, Artificial
  Synthetic
ucacuuguacgccauggaagagc

SEQ ID NO: 1350 - RNA, 23 nt, Artificial
  Synthetic
uagcacuuguacgccauggaaga

SEQ ID NO: 1351 - RNA, 23 nt, Artificial
  Synthetic
ugagcacuuguacgccauggaag

SEQ ID NO: 1352 - RNA, 23 nt, Artificial
  Synthetic
ucugagcacuuguacgccaugga

SEQ ID NO: 1353 - RNA, 23 nt, Artificial
  Synthetic
uaaaggucaugacugggcacauu

SEQ ID NO: 1354 - RNA, 23 nt, Artificial
  Synthetic
uguacagcuuugagaaaagguca

SEQ ID NO: 1355 - RNA, 23 nt, Artificial
  Synthetic
uacuguacagcuuugagaaaagg

SEQ ID NO: 1356 - RNA, 23 nt, Artificial
  Synthetic
ucgaucacugcugauggaagacu

SEQ ID NO: 1357 - RNA, 23 nt, Artificial
  Synthetic
uagccacaacaauauccacagca

SEQ ID NO: 1358 - RNA, 23 nt, Artificial
  Synthetic
ugguagucacuuagguguuuuaa

SEQ ID NO: 1359 - RNA, 23 nt, Artificial
  Synthetic
uacuuagguguuuuaaguuucuu

SEQ ID NO: 1360 - RNA, 23 nt, Artificial
  Synthetic
uguagucacuuagguguuuuaag

SEQ ID NO: 1361 - RNA, 23 nt, Artificial
  Synthetic
uuagucucaugcucacauaauuu

SEQ ID NO: 1362 - RNA, 23 nt, Artificial
  Synthetic
ugcauagucucaugcucacauaa

SEQ ID NO: 1363 - RNA, 23 nt, Artificial
  Synthetic
ugugcauagucucaugcucacau

SEQ ID NO: 1364 - RNA, 23 nt, Artificial
  Synthetic
uggugcauagucucaugcucaca

SEQ ID NO: 1365 - RNA, 23 nt, Artificial
  Synthetic
uaggugcauagucucaugcucac

SEQ ID NO: 1366 - RNA, 23 nt, Artificial
  Synthetic
uuaggugcauagucucaugcuca

SEQ ID NO: 1367 - RNA, 23 nt, Artificial
  Synthetic
uauaggugcauagucucaugcuc

SEQ ID NO: 1368 - RNA, 23 nt, Artificial
  Synthetic
uuuuauaggugcauagucucaug

SEQ ID NO: 1369 - RNA, 23 nt, Artificial
  Synthetic
uauuuauaggugcauagucucau

SEQ ID NO: 1370 - RNA, 23 nt, Artificial
  Synthetic
ucacaaguuaauaaaacacauca

SEQ ID NO: 1371 - RNA, 21 nt, Artificial
  Synthetic
caugaaaggacuuucaaagga

SEQ ID NO: 1372 - RNA, 21 nt, Artificial
  Synthetic
augaaaggacuuucaaaggca

SEQ ID NO: 1373 - RNA, 21 nt, Artificial
  Synthetic
ugaaaggacuuucaaaggcca

SEQ ID NO: 1374 - RNA, 21 nt, Artificial
  Synthetic
gaaaggacuuucaaaggccaa

SEQ ID NO: 1375 - RNA, 21 nt, Artificial
  Synthetic
aaaggacuuucaaaggccaaa

SEQ ID NO: 1376 - RNA, 21 nt, Artificial
  Synthetic
aaggacuuucaaaggccaaga

SEQ ID NO: 1377 - RNA, 21 nt, Artificial
  Synthetic
aggacuuucaaaggccaagga

SEQ ID NO: 1378 - RNA, 21 nt, Artificial
  Synthetic
aagaccaaagagcaagugaca

SEQ ID NO: 1379 - RNA, 21 nt, Artificial
  Synthetic
aagagcaagugacaaauguua

SEQ ID NO: 1380 - RNA, 21 nt, Artificial
  Synthetic
gagcaagugacaaauguugga

SEQ ID NO: 1381 - RNA, 21 nt, Artificial
  Synthetic
agcaagugacaaauguuggaa

SEQ ID NO: 1382 - RNA, 21 nt, Artificial
  Synthetic
gcaagugacaaauguuggaga

SEQ ID NO: 1383 - RNA, 21 nt, Artificial
  Synthetic
caagugacaaauguuggagga

SEQ ID NO: 1384 - RNA, 21 nt, Artificial
  Synthetic
aaugaggcuuaugaaaugcca

SEQ ID NO: 1385 - RNA, 21 nt, Artificial
  Synthetic
augaggcuuaugaaaugccua

SEQ ID NO: 1386 - RNA, 21 nt, Artificial
  Synthetic
ugaggcuuaugaaaugccuua

SEQ ID NO: 1387 - RNA, 21 nt, Artificial
  Synthetic
gaggcuuaugaaaugccuuca

SEQ ID NO: 1388 - RNA, 21 nt, Artificial
  Synthetic
agugcucaguuccaaugugca

SEQ ID NO: 1389 - RNA, 21 nt, Artificial
  Synthetic
ugcucaguuccaaugugccca

SEQ ID NO: 1390 - RNA, 21 nt, Artificial
  Synthetic
agucuuccaucagcagugaua

SEQ ID NO: 1391 - RNA, 21 nt, Artificial
  Synthetic
gaagugaauacaugguagcaa

SEQ ID NO: 1392 - RNA, 21 nt, Artificial
  Synthetic
agugaauacaugguagcagga

SEQ ID NO: 1393 - RNA, 21 nt, Artificial
  Synthetic
aaaaacaccuaagugacuaca

SEQ ID NO: 1394 - RNA, 21 nt, Artificial
  Synthetic
aaaacaccuaagugacuacca

SEQ ID NO: 1395 - RNA, 21 nt, Artificial
  Synthetic
aaacaccuaagugacuaccaa

SEQ ID NO: 1396 - RNA, 21 nt, Artificial
  Synthetic
aacaccuaagugacuaccaca

SEQ ID NO: 1397 - RNA, 21 nt, Artificial
  Synthetic
acaccuaagugacuaccacua

SEQ ID NO: 1398 - RNA, 21 nt, Artificial
  Synthetic
caccuaagugacuaccacuua

SEQ ID NO: 1399 - RNA, 21 nt, Artificial
  Synthetic
accuaagugacuaccacuuaa

SEQ ID NO: 1400 - RNA, 21 nt, Artificial
  Synthetic
ccuaagugacuaccacuuaua

SEQ ID NO: 1401 - RNA, 21 nt, Artificial
  Synthetic
cuaagugacuaccacuuauua

SEQ ID NO: 1402 - RNA, 21 nt, Artificial
  Synthetic
agugacuaccacuuauuucua

SEQ ID NO: 1403 - RNA, 21 nt, Artificial
  Synthetic
gugacuaccacuuauuucuaa

SEQ ID NO: 1404 - RNA, 21 nt, Artificial
  Synthetic
ugacuaccacuuauuucuaaa

SEQ ID NO: 1405 - RNA, 21 nt, Artificial
  Synthetic
aaacuaugcaccuauaaauaa

SEQ ID NO: 1406 - RNA, 21 nt, Artificial
  Synthetic
uuguguuuguauauaaaugga

SEQ ID NO: 1407 - RNA, 21 nt, Artificial
  Synthetic
caugaaaggacuuucaaagga

SEQ ID NO: 1408 - RNA, 21 nt, Artificial
  Synthetic
augaaaggacuuucaaaggca

SEQ ID NO: 1409 - RNA, 21 nt, Artificial
  Synthetic
ugaaaggacuuucaaaggcca

SEQ ID NO: 1410 - RNA, 21 nt, Artificial
  Synthetic
gaaaggacuuucaaaggccaa

SEQ ID NO: 1411 - RNA, 21 nt, Artificial
  Synthetic
aaaggacuuucaaaggccaaa

SEQ ID NO: 1412 - RNA, 21 nt, Artificial
  Synthetic
aaggacuuucaaaggccaaga

SEQ ID NO: 1413 - RNA, 21 nt, Artificial
  Synthetic
aggacuuucaaaggccaagga

SEQ ID NO: 1414 - RNA, 21 nt, Artificial
  Synthetic
aagaccaaagagcaagugaca

SEQ ID NO: 1415 - RNA, 21 nt, Artificial
  Synthetic
aagagcaagugacaaauguua

SEQ ID NO: 1416 - RNA, 21 nt, Artificial
  Synthetic
gagcaagugacaaauguugga

SEQ ID NO: 1417 - RNA, 21 nt, Artificial
  Synthetic
agcaagugacaaauguuggaa

SEQ ID NO: 1418 - RNA, 21 nt, Artificial
  Synthetic
gcaagugacaaauguuggaga

SEQ ID NO: 1419 - RNA, 21 nt, Artificial
  Synthetic
caagugacaaauguuggagga

SEQ ID NO: 1420 - RNA, 21 nt, Artificial
  Synthetic
aaugaggcuuaugaaaugcca

SEQ ID NO: 1421 - RNA, 21 nt, Artificial
  Synthetic
augaggcuuaugaaaugccua

SEQ ID NO: 1422 - RNA, 21 nt, Artificial
  Synthetic
ugaggcuuaugaaaugccuua

SEQ ID NO: 1423 - RNA, 21 nt, Artificial
  Synthetic
gaggcuuaugaaaugccuuca

SEQ ID NO: 1424 - RNA, 21 nt, Artificial
  Synthetic
uguacaagugcucaguuccaa

SEQ ID NO: 1425 - RNA, 21 nt, Artificial
  Synthetic
guacaagugcucaguuccaaa

SEQ ID NO: 1426 - RNA, 21 nt, Artificial
  Synthetic
agugcucaguuccaaugugca

SEQ ID NO: 1427 - RNA, 21 nt, Artificial
  Synthetic
ugcucaguuccaaugugccca

SEQ ID NO: 1428 - RNA, 21 nt, Artificial
  Synthetic
gaagucuuccaucagcaguga

SEQ ID NO: 1429 - RNA, 21 nt, Artificial
  Synthetic
aagucuuccaucagcagugaa

SEQ ID NO: 1430 - RNA, 21 nt, Artificial
  Synthetic
agucuuccaucagcagugaua

SEQ ID NO: 1431 - RNA, 21 nt, Artificial
  Synthetic
gaagugaauacaugguagcaa

SEQ ID NO: 1432 - RNA, 21 nt, Artificial
  Synthetic
ugaagucuuccaucagcagua

SEQ ID NO: 1433 - RNA, 21 nt, Artificial
  Synthetic
uaaaaacaccuaagugacuaa

SEQ ID NO: 1434 - RNA, 21 nt, Artificial
  Synthetic
aaaaacaccuaagugacuaca

SEQ ID NO: 1435 - RNA, 21 nt, Artificial
  Synthetic
aaaacaccuaagugacuacca

SEQ ID NO: 1436 - RNA, 21 nt, Artificial
  Synthetic
aaacaccuaagugacuaccaa

SEQ ID NO: 1437 - RNA, 21 nt, Artificial
  Synthetic
aacaccuaagugacuaccaca

SEQ ID NO: 1438 - RNA, 21 nt, Artificial
  Synthetic
acaccuaagugacuaccacua

SEQ ID NO: 1439 - RNA, 21 nt, Artificial
  Synthetic
caccuaagugacuaccacuua

SEQ ID NO: 1440 - RNA, 21 nt, Artificial
  Synthetic
accuaagugacuaccacuuaa

SEQ ID NO: 1441 - RNA, 21 nt, Artificial
  Synthetic
ccuaagugacuaccacuuaua

SEQ ID NO: 1442 - RNA, 21 nt, Artificial
  Synthetic
cuaagugacuaccacuuauua

SEQ ID NO: 1443 - RNA, 21 nt, Artificial
  Synthetic
uaagugacuaccacuuauuua

SEQ ID NO: 1444 - RNA, 21 nt, Artificial
  Synthetic
aagugacuaccacuuauuuca

SEQ ID NO: 1445 - RNA, 21 nt, Artificial
  Synthetic
agugacuaccacuuauuucua

SEQ ID NO: 1446 - RNA, 21 nt, Artificial
  Synthetic
gugacuaccacuuauuucuaa

SEQ ID NO: 1447 - RNA, 21 nt, Artificial
  Synthetic
ugacuaccacuuauuucuaaa

SEQ ID NO: 1448 - RNA, 21 nt, Artificial
  Synthetic
aaacuaugcaccuauaaauaa

SEQ ID NO: 1449 - RNA, 21 nt, Artificial
  Synthetic
auguguuuuauuaacuuguga

SEQ ID NO: 1450 - RNA, 21 nt, Artificial
  Synthetic
uguguuuuauuaacuugugua

SEQ ID NO: 1451 - RNA, 21 nt, Artificial
  Synthetic
uuguguuuguauauaaaugga

SEQ ID NO: 1452 - RNA, 21 nt, Artificial
  Synthetic
uguacaagugcucaguuccaa

SEQ ID NO: 1453 - RNA, 21 nt, Artificial
  Synthetic
guacaagugcucaguuccaaa

SEQ ID NO: 1454 - RNA, 21 nt, Artificial
  Synthetic
ugaagucuuccaucagcagua

SEQ ID NO: 1455 - RNA, 21 nt, Artificial
  Synthetic
gaagucuuccaucagcaguga

SEQ ID NO: 1456 - RNA, 21 nt, Artificial
  Synthetic
aagucuuccaucagcagugaa

SEQ ID NO: 1457 - RNA, 21 nt, Artificial
  Synthetic
uaaaaacaccuaagugacuaa

SEQ ID NO: 1458 - RNA, 21 nt, Artificial
  Synthetic
auguguuuuauuaacuuguga

SEQ ID NO: 1459 - RNA, 21 nt, Artificial
  Synthetic
uguguuuuauuaacuugugua

SEQ ID NO: 1460 - RNA, 23 nt, Artificial
  Synthetic
uccuuugaaaguccuuucaugaa

SEQ ID NO: 1461 - DNA, 23 bp, Artificial
  Synthetic
ugccuutgaaaguccuuucauga

SEQ ID NO: 1462 - DNA, 23 bp, Artificial
  Synthetic
uggccutugaaaguccuuucaug

SEQ ID NO: 1463 - DNA, 23 bp, Artificial
  Synthetic
uuggcctuugaaaguccuuucau

SEQ ID NO: 1464 - RNA, 23 nt, Artificial
  Synthetic
uuuggccuuugaaaguccuuuca

SEQ ID NO: 1465 - RNA, 23 nt, Artificial
  Synthetic
ucuuggccuuugaaaguccuuuc

SEQ ID NO: 1466 - RNA, 23 nt, Artificial
  Synthetic
uccuuggccuuugaaaguccuuu

SEQ ID NO: 1467 - DNA, 23 bp, Artificial
  Synthetic
ugucactugcucuuuggucuucu

SEQ ID NO: 1468 - DNA, 23 bp, Artificial
  Synthetic
uaacautugucacuugcucuuug

SEQ ID NO: 1469 - RNA, 23 nt, Artificial
  Synthetic
uccaacauuugucacuugcucuu

SEQ ID NO: 1470 - RNA, 23 nt, Artificial
  Synthetic
uuccaacauuugucacuugcucu

SEQ ID NO: 1471 - RNA, 23 nt, Artificial
  Synthetic
ucuccaacauuugucacuugcuc

SEQ ID NO: 1472 - RNA, 23 nt, Artificial
  Synthetic
uccuccaacauuugucacuugcu

SEQ ID NO: 1473 - DNA, 23 bp, Artificial
  Synthetic
uggcautucauaagccucauugu

SEQ ID NO: 1474 - DNA, 23 bp, Artificial
  Synthetic
uaggcatuucauaagccucauug

SEQ ID NO: 1475 - RNA, 23 nt, Artificial
  Synthetic
uaaggcauuucauaagccucauu

SEQ ID NO: 1476 - RNA, 23 nt, Artificial
  Synthetic
ugaaggcauuucauaagccucau

SEQ ID NO: 1477 - DNA, 23 bp, Artificial
  Synthetic
ugcacatuggaacugagcacuug

SEQ ID NO: 1478 - RNA, 23 nt, Artificial
  Synthetic
ugggcacauuggaacugagcacu

SEQ ID NO: 1479 - DNA, 23 bp, Artificial
  Synthetic
uaucactgcugauggaagacuuc

SEQ ID NO: 1480 - RNA, 23 nt, Artificial
  Synthetic
uugcuaccauguauucacuucag

SEQ ID NO: 1481 - DNA, 23 bp, Artificial
  Synthetic
uccugctaccauguauucacuuc

SEQ ID NO: 1482 - RNA, 23 nt, Artificial
  Synthetic
uguagucacuuagguguuuuuaa

SEQ ID NO: 1483 - DNA, 23 bp, Artificial
  Synthetic
ugguagtcacuuagguguuuuua

SEQ ID NO: 1484 - RNA, 23 nt, Artificial
  Synthetic
uugguagucacuuagguguuuuu

SEQ ID NO: 1485 - RNA, 23 nt, Artificial
  Synthetic
ugugguagucacuuagguguuuu

SEQ ID NO: 1486 - DNA, 23 bp, Artificial
  Synthetic
uaguggtagucacuuagguguuu

SEQ ID NO: 1487 - RNA, 23 nt, Artificial
  Synthetic
uaagugguagucacuuagguguu

SEQ ID NO: 1488 - RNA, 23 nt, Artificial
  Synthetic
uuaagugguagucacuuaggugu

SEQ ID NO: 1489 - DNA, 23 bp, Artificial
  Synthetic
uauaagtgguagucacuuaggug

SEQ ID NO: 1490 - RNA, 23 nt, Artificial
  Synthetic
uaauaagugguagucacuuaggu

SEQ ID NO: 1491 - DNA, 23 bp, Artificial
  Synthetic
uagaaataagugguagucacuua

SEQ ID NO: 1492 - RNA, 23 nt, Artificial
  Synthetic
uuagaaauaagugguagucacuu

SEQ ID NO: 1493 - RNA, 23 nt, Artificial
  Synthetic
uuuagaaauaagugguagucacu

SEQ ID NO: 1494 - RNA, 23 nt, Artificial
  Synthetic
uuauuuauaggugcauaguuuca

SEQ ID NO: 1495 - DNA, 23 bp, Artificial
  Synthetic
uccauutauauacaaacacaagu

SEQ ID NO: 1496 - RNA, 23 nt, Artificial
  Synthetic
uccuuugaaaguccuuucaugaa

SEQ ID NO: 1497 - RNA, 23 nt, Artificial
  Synthetic
ugccuuugaaaguccuuucauga

SEQ ID NO: 1498 - RNA, 23 nt, Artificial
  Synthetic
uggccuuugaaaguccuuucaug

SEQ ID NO: 1499 - RNA, 23 nt, Artificial
  Synthetic
uuggccuuugaaaguccuuucau

SEQ ID NO: 1500 - RNA, 23 nt, Artificial
  Synthetic
uuuggccuuugaaaguccuuuca

SEQ ID NO: 1501 - RNA, 23 nt, Artificial
  Synthetic
ucuuggccuuugaaaguccuuuc

SEQ ID NO: 1502 - RNA, 23 nt, Artificial
  Synthetic
uccuuggccuuugaaaguccuuu

SEQ ID NO: 1503 - RNA, 23 nt, Artificial
  Synthetic
ugucacuugcucuuuggucuucu

SEQ ID NO: 1504 - RNA, 23 nt, Artificial
  Synthetic
uaacauuugucacuugcucuuug

SEQ ID NO: 1505 - RNA, 23 nt, Artificial
  Synthetic
uccaacauuugucacuugcucuu

SEQ ID NO: 1506 - RNA, 23 nt, Artificial
  Synthetic
uuccaacauuugucacuugcucu

SEQ ID NO: 1507 - RNA, 23 nt, Artificial
  Synthetic
ucuccaacauuugucacuugcuc

SEQ ID NO: 1508 - RNA, 23 nt, Artificial
  Synthetic
uccuccaacauuugucacuugcu

SEQ ID NO: 1509 - RNA, 23 nt, Artificial
  Synthetic
uggcauuucauaagccucauugu

SEQ ID NO: 1510 - RNA, 23 nt, Artificial
  Synthetic
uaggcauuucauaagccucauug

SEQ ID NO: 1511 - RNA, 23 nt, Artificial
  Synthetic
uaaggcauuucauaagccucauu

SEQ ID NO: 1512 - RNA, 23 nt, Artificial
  Synthetic
ugaaggcauuucauaagccucau

SEQ ID NO: 1513 - RNA, 23 nt, Artificial
  Synthetic
uuggaacugagcacuuguacaag

SEQ ID NO: 1514 - RNA, 23 nt, Artificial
  Synthetic
uuuggaacugagcacuuguacaa

SEQ ID NO: 1515 - RNA, 23 nt, Artificial
  Synthetic
ugcacauuggaacugagcacuug

SEQ ID NO: 1516 - RNA, 23 nt, Artificial
  Synthetic
ugggcacauuggaacugagcacu

SEQ ID NO: 1517 - RNA, 23 nt, Artificial
  Synthetic
ucacugcugauggaagacuucaa

SEQ ID NO: 1518 - RNA, 23 nt, Artificial
  Synthetic
uucacugcugauggaagacuuca

SEQ ID NO: 1519 - RNA, 23 nt, Artificial
  Synthetic
uaucacugcugauggaagacuuc

SEQ ID NO: 1520 - RNA, 23 nt, Artificial
  Synthetic
uugcuaccauguauucacuucag

SEQ ID NO: 1521 - RNA, 23 nt, Artificial
  Synthetic
uacugcugauggaagacuucaaa

SEQ ID NO: 1522 - RNA, 23 nt, Artificial
  Synthetic
uuagucacuuagguguuuuuaaa

SEQ ID NO: 1523 - RNA, 23 nt, Artificial
  Synthetic
uguagucacuuagguguuuuuaa

SEQ ID NO: 1524 - RNA, 23 nt, Artificial
  Synthetic
ugguagucacuuagguguuuuua

SEQ ID NO: 1525 - RNA, 23 nt, Artificial
  Synthetic
uugguagucacuuagguguuuuu

SEQ ID NO: 1526 - RNA, 23 nt, Artificial
  Synthetic
ugugguagucacuuagguguuuu

SEQ ID NO: 1527 - RNA, 23 nt, Artificial
  Synthetic
uagugguagucacuuagguguuu

SEQ ID NO: 1528 - RNA, 23 nt, Artificial
  Synthetic
uaagugguagucacuuagguguu

SEQ ID NO: 1529 - RNA, 23 nt, Artificial
  Synthetic
uuaagugguagucacuuaggugu

SEQ ID NO: 1530 - RNA, 23 nt, Artificial
  Synthetic
uauaagugguagucacuuaggug

SEQ ID NO: 1531 - RNA, 23 nt, Artificial
  Synthetic
uaauaagugguagucacuuaggu

SEQ ID NO: 1532 - RNA, 23 nt, Artificial
  Synthetic
uaaauaagugguagucacuuagg

SEQ ID NO: 1533 - RNA, 23 nt, Artificial
  Synthetic
ugaaauaagugguagucacuuag

SEQ ID NO: 1534 - RNA, 23 nt, Artificial
  Synthetic
uagaaauaagugguagucacuua

SEQ ID NO: 1535 - RNA, 23 nt, Artificial
  Synthetic
uuagaaauaagugguagucacuu

SEQ ID NO: 1536 - RNA, 23 nt, Artificial
  Synthetic
uuuagaaauaagugguagucacu

SEQ ID NO: 1537 - RNA, 23 nt, Artificial
  Synthetic
uuauuuauaggugcauaguuuca

SEQ ID NO: 1538 - RNA, 23 nt, Artificial
  Synthetic
ucacaaguuaauaaaacacauca

SEQ ID NO: 1539 - RNA, 23 nt, Artificial
  Synthetic
uacacaaguuaauaaaacacauc

SEQ ID NO: 1540 - RNA, 23 nt, Artificial
  Synthetic
uccauuuauauacaaacacaagu

SEQ ID NO: 1541 - RNA, 23 nt, Artificial
  Synthetic
uuggaacugagcacuuguacaag

SEQ ID NO: 1542 - RNA, 23 nt, Artificial
  Synthetic
uuuggaacugagcacuuguacaa

SEQ ID NO: 1543 - DNA, 23 bp, Artificial
  Synthetic
uacugctgauggaagacuucaaa

SEQ ID NO: 1544 - RNA, 23 nt, Artificial
  Synthetic
ucacugcugauggaagacuucaa

SEQ ID NO: 1545 - RNA, 23 nt, Artificial
  Synthetic
uucacugcugauggaagacuuca

SEQ ID NO: 1546 - RNA, 23 nt, Artificial
  Synthetic
uuagucacuuagguguuuuuaaa

SEQ ID NO: 1547 - RNA, 23 nt, Artificial
  Synthetic
ucacaaguuaauaaaacacauca

SEQ ID NO: 1548 - RNA, 23 nt, Artificial
  Synthetic
uacacaaguuaauaaaacacauc

SEQ ID NO: 1549 - RNA, 23 nt, Artificial
  Synthetic
uucaugaaaggacuuucaaaggc

SEQ ID NO: 1550 - RNA, 23 nt, Artificial
  Synthetic
ucaugaaaggacuuucaaaggcc

SEQ ID NO: 1551 - RNA, 23 nt, Artificial
  Synthetic
caugaaaggacuuucaaaggcca

SEQ ID NO: 1552 - RNA, 23 nt, Artificial
  Synthetic
augaaaggacuuucaaaggccaa

SEQ ID NO: 1553 - RNA, 23 nt, Artificial
  Synthetic
ugaaaggacuuucaaaggccaag

SEQ ID NO: 1554 - RNA, 23 nt, Artificial
  Synthetic
gaaaggacuuucaaaggccaagg

SEQ ID NO: 1555 - RNA, 23 nt, Artificial
  Synthetic
aaaggacuuucaaaggccaagga

SEQ ID NO: 1556 - RNA, 23 nt, Artificial
  Synthetic
agaagaccaaagagcaagugaca

SEQ ID NO: 1557 - RNA, 23 nt, Artificial
  Synthetic
caaagagcaagugacaaauguug

SEQ ID NO: 1558 - RNA, 23 nt, Artificial
  Synthetic
aagagcaagugacaaauguugga

SEQ ID NO: 1559 - RNA, 23 nt, Artificial
  Synthetic
agagcaagugacaaauguuggag

SEQ ID NO: 1560 - RNA, 23 nt, Artificial
  Synthetic
gagcaagugacaaauguuggagg

SEQ ID NO: 1561 - RNA, 23 nt, Artificial
  Synthetic
agcaagugacaaauguuggagga

SEQ ID NO: 1562 - RNA, 23 nt, Artificial
  Synthetic
acaaugaggcuuaugaaaugccu

SEQ ID NO: 1563 - RNA, 23 nt, Artificial
  Synthetic
caaugaggcuuaugaaaugccuu

SEQ ID NO: 1564 - RNA, 23 nt, Artificial
  Synthetic
aaugaggcuuaugaaaugccuuc

SEQ ID NO: 1565 - RNA, 23 nt, Artificial
  Synthetic
augaggcuuaugaaaugccuucu

SEQ ID NO: 1566 - RNA, 23 nt, Artificial
  Synthetic
caagugcucaguuccaaugugcc

SEQ ID NO: 1567 - RNA, 23 nt, Artificial
  Synthetic
agugcucaguuccaaugugccca

SEQ ID NO: 1568 - RNA, 23 nt, Artificial
  Synthetic
gaagucuuccaucagcagugauu

SEQ ID NO: 1569 - RNA, 23 nt, Artificial
  Synthetic
cugaagugaauacaugguagcag

SEQ ID NO: 1570 - RNA, 23 nt, Artificial
  Synthetic
gaagugaauacaugguagcaggg

SEQ ID NO: 1571 - RNA, 23 nt, Artificial
  Synthetic
uuaaaaacaccuaagugacuacc

SEQ ID NO: 1572 - RNA, 23 nt, Artificial
  Synthetic
uaaaaacaccuaagugacuacca

SEQ ID NO: 1573 - RNA, 23 nt, Artificial
  Synthetic
aaaaacaccuaagugacuaccac

SEQ ID NO: 1574 - RNA, 23 nt, Artificial
  Synthetic
aaaacaccuaagugacuaccacu

SEQ ID NO: 1575 - RNA, 23 nt, Artificial
  Synthetic
aaacaccuaagugacuaccacuu

SEQ ID NO: 1576 - RNA, 23 nt, Artificial
  Synthetic
aacaccuaagugacuaccacuua

SEQ ID NO: 1577 - RNA, 23 nt, Artificial
  Synthetic
acaccuaagugacuaccacuuau

SEQ ID NO: 1578 - RNA, 23 nt, Artificial
  Synthetic
caccuaagugacuaccacuuauu

SEQ ID NO: 1579 - RNA, 23 nt, Artificial
  Synthetic
accuaagugacuaccacuuauuu

SEQ ID NO: 1580 - RNA, 23 nt, Artificial
  Synthetic
uaagugacuaccacuuauuucua

SEQ ID NO: 1581 - RNA, 23 nt, Artificial
  Synthetic
aagugacuaccacuuauuucuaa

SEQ ID NO: 1582 - RNA, 23 nt, Artificial
  Synthetic
agugacuaccacuuauuucuaaa

SEQ ID NO: 1583 - RNA, 23 nt, Artificial
  Synthetic
ugaaacuaugcaccuauaaauac

SEQ ID NO: 1584 - RNA, 23 nt, Artificial
  Synthetic
acuuguguuuguauauaaauggu

SEQ ID NO: 1585 - RNA, 23 nt, Artificial
  Synthetic
uucaugaaaggacuuucaaaggc

SEQ ID NO: 1586 - RNA, 23 nt, Artificial
  Synthetic
ucaugaaaggacuuucaaaggcc

SEQ ID NO: 1587 - RNA, 23 nt, Artificial
  Synthetic
caugaaaggacuuucaaaggcca

SEQ ID NO: 1588 - RNA, 23 nt, Artificial
  Synthetic
augaaaggacuuucaaaggccaa

SEQ ID NO: 1589 - RNA, 23 nt, Artificial
  Synthetic
ugaaaggacuuucaaaggccaag

SEQ ID NO: 1590 - RNA, 23 nt, Artificial
  Synthetic
gaaaggacuuucaaaggccaagg

SEQ ID NO: 1591 - RNA, 23 nt, Artificial
  Synthetic
aaaggacuuucaaaggccaagga

SEQ ID NO: 1592 - RNA, 23 nt, Artificial
  Synthetic
agaagaccaaagagcaagugaca

SEQ ID NO: 1593 - RNA, 23 nt, Artificial
  Synthetic
caaagagcaagugacaaauguug

SEQ ID NO: 1594 - RNA, 23 nt, Artificial
  Synthetic
aagagcaagugacaaauguugga

SEQ ID NO: 1595 - RNA, 23 nt, Artificial
  Synthetic
agagcaagugacaaauguuggag

SEQ ID NO: 1596 - RNA, 23 nt, Artificial
  Synthetic
gagcaagugacaaauguuggagg

SEQ ID NO: 1597 - RNA, 23 nt, Artificial
  Synthetic
agcaagugacaaauguuggagga

SEQ ID NO: 1598 - RNA, 23 nt, Artificial
  Synthetic
acaaugaggcuuaugaaaugccu

SEQ ID NO: 1599 - RNA, 23 nt, Artificial
  Synthetic
caaugaggcuuaugaaaugccuu

SEQ ID NO: 1600 - RNA, 23 nt, Artificial
  Synthetic
aaugaggcuuaugaaaugccuuc

SEQ ID NO: 1601 - RNA, 23 nt, Artificial
  Synthetic
augaggcuuaugaaaugccuucu

SEQ ID NO: 1602 - RNA, 23 nt, Artificial
  Synthetic
caagugcucaguuccaaugugcc

SEQ ID NO: 1603 - RNA, 23 nt, Artificial
  Synthetic
agugcucaguuccaaugugccca

SEQ ID NO: 1604 - RNA, 23 nt, Artificial
  Synthetic
gaagucuuccaucagcagugauu

SEQ ID NO: 1605 - RNA, 23 nt, Artificial
  Synthetic
cugaagugaauacaugguagcag

SEQ ID NO: 1606 - RNA, 23 nt, Artificial
  Synthetic
uuugaagucuuccaucagcagug

SEQ ID NO: 1607 - RNA, 23 nt, Artificial
  Synthetic
uuaaaaacaccuaagugacuacc

SEQ ID NO: 1608 - RNA, 23 nt, Artificial
  Synthetic
uaaaaacaccuaagugacuacca

SEQ ID NO: 1609 - RNA, 23 nt, Artificial
  Synthetic
aaaaacaccuaagugacuaccac

SEQ ID NO: 1610 - RNA, 23 nt, Artificial
  Synthetic
aaaacaccuaagugacuaccacu

SEQ ID NO: 1611 - RNA, 23 nt, Artificial
  Synthetic
aaacaccuaagugacuaccacuu

SEQ ID NO: 1612 - RNA, 23 nt, Artificial
  Synthetic
aacaccuaagugacuaccacuua

SEQ ID NO: 1613 - RNA, 23 nt, Artificial
  Synthetic
acaccuaagugacuaccacuuau

SEQ ID NO: 1614 - RNA, 23 nt, Artificial
  Synthetic
caccuaagugacuaccacuuauu

SEQ ID NO: 1615 - RNA, 23 nt, Artificial
  Synthetic
accuaagugacuaccacuuauuu

SEQ ID NO: 1616 - RNA, 23 nt, Artificial
  Synthetic
ccuaagugacuaccacuuauuuc

SEQ ID NO: 1617 - RNA, 23 nt, Artificial
  Synthetic
cuaagugacuaccacuuauuucu

SEQ ID NO: 1618 - RNA, 23 nt, Artificial
  Synthetic
uaagugacuaccacuuauuucua

SEQ ID NO: 1619 - RNA, 23 nt, Artificial
  Synthetic
aagugacuaccacuuauuucuaa

SEQ ID NO: 1620 - RNA, 23 nt, Artificial
  Synthetic
agugacuaccacuuauuucuaaa

SEQ ID NO: 1621 - RNA, 23 nt, Artificial
  Synthetic
ugaaacuaugcaccuauaaauac

SEQ ID NO: 1622 - RNA, 23 nt, Artificial
  Synthetic
ugauguguuuuauuaacuugugu

SEQ ID NO: 1623 - RNA, 23 nt, Artificial
  Synthetic
gauguguuuuauuaacuuguguu

SEQ ID NO: 1624 - RNA, 23 nt, Artificial
  Synthetic
acuuguguuuguauauaaauggu

SEQ ID NO: 1625 - RNA, 23 nt, Artificial
  Synthetic
uuugaagucuuccaucagcagug

SEQ ID NO: 1626 - RNA, 23 nt, Artificial
  Synthetic
ugauguguuuuauuaacuugugu

SEQ ID NO: 1627 - RNA, 23 nt, Artificial
  Synthetic
gauguguuuuauuaacuuguguu

SEQ ID NO: 1628 - RNA, 21 nt, Artificial
  Synthetic
caugaaaggacuuucaaagga

SEQ ID NO: 1629 - RNA, 21 nt, Artificial
  Synthetic
augaaaggacuuucaaaggca

SEQ ID NO: 1630 - RNA, 21 nt, Artificial
  Synthetic
ugaaaggacuuucaaaggcca

SEQ ID NO: 1631 - RNA, 21 nt, Artificial
  Synthetic
gaaaggacuuucaaaggccaa

SEQ ID NO: 1632 - RNA, 21 nt, Artificial
  Synthetic
aaaggacuuucaaaggccaaa

SEQ ID NO: 1633 - RNA, 21 nt, Artificial
  Synthetic
aaggacuuucaaaggccaaga

SEQ ID NO: 1634 - RNA, 21 nt, Artificial
  Synthetic
aggacuuucaaaggccaagga

SEQ ID NO: 1635 - RNA, 21 nt, Artificial
  Synthetic
aagaccaaagagcaagugaca

SEQ ID NO: 1636 - RNA, 21 nt, Artificial
  Synthetic
aagagcaagugacaaauguua

SEQ ID NO: 1637 - RNA, 21 nt, Artificial
  Synthetic
gagcaagugacaaauguugga

SEQ ID NO: 1638 - RNA, 21 nt, Artificial
  Synthetic
agcaagugacaaauguuggaa

SEQ ID NO: 1639 - RNA, 21 nt, Artificial
  Synthetic
gcaagugacaaauguuggaga

SEQ ID NO: 1640 - RNA, 21 nt, Artificial
  Synthetic
caagugacaaauguuggagga

SEQ ID NO: 1641 - RNA, 21 nt, Artificial
  Synthetic
aaugaggcuuaugaaaugcca

SEQ ID NO: 1642 - RNA, 21 nt, Artificial
  Synthetic
augaggcuuaugaaaugccua

SEQ ID NO: 1643 - RNA, 21 nt, Artificial
  Synthetic
ugaggcuuaugaaaugccuua

SEQ ID NO: 1644 - RNA, 21 nt, Artificial
  Synthetic
gaggcuuaugaaaugccuuca

SEQ ID NO: 1645 - RNA, 21 nt, Artificial
  Synthetic
agugcucaguuccaaugugca

SEQ ID NO: 1646 - RNA, 21 nt, Artificial
  Synthetic
ugcucaguuccaaugugccca

SEQ ID NO: 1647 - RNA, 21 nt, Artificial
  Synthetic
agucuuccaucagcagugaua

SEQ ID NO: 1648 - RNA, 21 nt, Artificial
  Synthetic
gaagugaauacaugguagcaa

SEQ ID NO: 1649 - RNA, 21 nt, Artificial
  Synthetic
agugaauacaugguagcagga

SEQ ID NO: 1650 - RNA, 21 nt, Artificial
  Synthetic
aaaaacaccuaagugacuaca

SEQ ID NO: 1651 - RNA, 21 nt, Artificial
  Synthetic
aaaacaccuaagugacuacca

SEQ ID NO: 1652 - RNA, 21 nt, Artificial
  Synthetic
aaacaccuaagugacuaccaa

SEQ ID NO: 1653 - RNA, 21 nt, Artificial
  Synthetic
aacaccuaagugacuaccaca

SEQ ID NO: 1654 - RNA, 21 nt, Artificial
  Synthetic
acaccuaagugacuaccacua

SEQ ID NO: 1655 - RNA, 21 nt, Artificial
  Synthetic
caccuaagugacuaccacuua

SEQ ID NO: 1656 - RNA, 21 nt, Artificial
  Synthetic
accuaagugacuaccacuuaa

SEQ ID NO: 1657 - RNA, 21 nt, Artificial
  Synthetic
ccuaagugacuaccacuuaua

SEQ ID NO: 1658 - RNA, 21 nt, Artificial
  Synthetic
cuaagugacuaccacuuauua

SEQ ID NO: 1659 - RNA, 21 nt, Artificial
  Synthetic
agugacuaccacuuauuucua

SEQ ID NO: 1660 - RNA, 21 nt, Artificial
  Synthetic
gugacuaccacuuauuucuaa

SEQ ID NO: 1661 - RNA, 21 nt, Artificial
  Synthetic
ugacuaccacuuauuucuaaa

SEQ ID NO: 1662 - RNA, 21 nt, Artificial
  Synthetic
aaacuaugcaccuauaaauaa

SEQ ID NO: 1663 - RNA, 21 nt, Artificial
  Synthetic
uuguguuuguauauaaaugga

SEQ ID NO: 1664 - RNA, 21 nt, Artificial
  Synthetic
caugaaaggacuuucaaagga

SEQ ID NO: 1665 - RNA, 21 nt, Artificial
  Synthetic
augaaaggacuuucaaaggca

SEQ ID NO: 1666 - RNA, 21 nt, Artificial
  Synthetic
ugaaaggacuuucaaaggcca

SEQ ID NO: 1667 - RNA, 21 nt, Artificial
  Synthetic
gaaaggacuuucaaaggccaa

SEQ ID NO: 1668 - RNA, 21 nt, Artificial
  Synthetic
aaaggacuuucaaaggccaaa

SEQ ID NO: 1669 - RNA, 21 nt, Artificial
  Synthetic
aaggacuuucaaaggccaaga

SEQ ID NO: 1670 - RNA, 21 nt, Artificial
  Synthetic
aggacuuucaaaggccaagga

SEQ ID NO: 1671 - RNA, 21 nt, Artificial
  Synthetic
aagaccaaagagcaagugaca

SEQ ID NO: 1672 - RNA, 21 nt, Artificial
  Synthetic
aagagcaagugacaaauguua

SEQ ID NO: 1673 - RNA, 21 nt, Artificial
  Synthetic
gagcaagugacaaauguugga

SEQ ID NO: 1674 - RNA, 21 nt, Artificial
  Synthetic
agcaagugacaaauguuggaa

SEQ ID NO: 1675 - RNA, 21 nt, Artificial
  Synthetic
gcaagugacaaauguuggaga

SEQ ID NO: 1676 - RNA, 21 nt, Artificial
  Synthetic
caagugacaaauguuggagga

SEQ ID NO: 1677 - RNA, 21 nt, Artificial
  Synthetic
aaugaggcuuaugaaaugcca

SEQ ID NO: 1678 - RNA, 21 nt, Artificial
  Synthetic
augaggcuuaugaaaugccua

SEQ ID NO: 1679 - RNA, 21 nt, Artificial
  Synthetic
ugaggcuuaugaaaugccuua

SEQ ID NO: 1680 - RNA, 21 nt, Artificial
  Synthetic
gaggcuuaugaaaugccuuca

SEQ ID NO: 1681 - RNA, 21 nt, Artificial
  Synthetic
uguacaagugcucaguuccaa

SEQ ID NO: 1682 - RNA, 21 nt, Artificial
  Synthetic
guacaagugcucaguuccaaa

SEQ ID NO: 1683 - RNA, 21 nt, Artificial
  Synthetic
agugcucaguuccaaugugca

SEQ ID NO: 1684 - RNA, 21 nt, Artificial
  Synthetic
ugcucaguuccaaugugccca

SEQ ID NO: 1685 - RNA, 21 nt, Artificial
  Synthetic
gaagucuuccaucagcaguga

SEQ ID NO: 1686 - RNA, 21 nt, Artificial
  Synthetic
aagucuuccaucagcagugaa

SEQ ID NO: 1687 - RNA, 21 nt, Artificial
  Synthetic
agucuuccaucagcagugaua

SEQ ID NO: 1688 - RNA, 21 nt, Artificial
  Synthetic
gaagugaauacaugguagcaa

SEQ ID NO: 1689 - RNA, 21 nt, Artificial
  Synthetic
ugaagucuuccaucagcagua

SEQ ID NO: 1690 - RNA, 21 nt, Artificial
  Synthetic
uaaaaacaccuaagugacuaa

SEQ ID NO: 1691 - RNA, 21 nt, Artificial
  Synthetic
aaaaacaccuaagugacuaca

SEQ ID NO: 1692 - RNA, 21 nt, Artificial
  Synthetic
aaaacaccuaagugacuacca

SEQ ID NO: 1693 - RNA, 21 nt, Artificial
  Synthetic
aaacaccuaagugacuaccaa

SEQ ID NO: 1694 - RNA, 21 nt, Artificial
  Synthetic
aacaccuaagugacuaccaca

SEQ ID NO: 1695 - RNA, 21 nt, Artificial
  Synthetic
acaccuaagugacuaccacua

SEQ ID NO: 1696 - RNA, 21 nt, Artificial
  Synthetic
caccuaagugacuaccacuua

SEQ ID NO: 1697 - RNA, 21 nt, Artificial
  Synthetic
accuaagugacuaccacuuaa

SEQ ID NO: 1698 - RNA, 21 nt, Artificial
  Synthetic
ccuaagugacuaccacuuaua

SEQ ID NO: 1699 - RNA, 21 nt, Artificial
  Synthetic
cuaagugacuaccacuuauua

SEQ ID NO: 1700 - RNA, 21 nt, Artificial
  Synthetic
uaagugacuaccacuuauuua

SEQ ID NO: 1701 - RNA, 21 nt, Artificial
  Synthetic
aagugacuaccacuuauuuca

SEQ ID NO: 1702 - RNA, 21 nt, Artificial
  Synthetic
agugacuaccacuuauuucua

SEQ ID NO: 1703 - RNA, 21 nt, Artificial
  Synthetic
gugacuaccacuuauuucuaa

SEQ ID NO: 1704 - RNA, 21 nt, Artificial
  Synthetic
ugacuaccacuuauuucuaaa

SEQ ID NO: 1705 - RNA, 21 nt, Artificial
  Synthetic
aaacuaugcaccuauaaauaa

SEQ ID NO: 1706 - RNA, 21 nt, Artificial
  Synthetic
auguguuuuauuaacuuguga

SEQ ID NO: 1707 - RNA, 21 nt, Artificial
  Synthetic
uguguuuuauuaacuugugua

SEQ ID NO: 1708 - RNA, 21 nt, Artificial
  Synthetic
uuguguuuguauauaaaugga

SEQ ID NO: 1709 - RNA, 21 nt, Artificial
  Synthetic
uguacaagugcucaguuccaa

SEQ ID NO: 1710 - RNA, 21 nt, Artificial
  Synthetic
guacaagugcucaguuccaaa

SEQ ID NO: 1711 - RNA, 21 nt, Artificial
  Synthetic
ugaagucuuccaucagcagua

SEQ ID NO: 1712 - RNA, 21 nt, Artificial
  Synthetic
gaagucuuccaucagcaguga

SEQ ID NO: 1713 - RNA, 21 nt, Artificial
  Synthetic
aagucuuccaucagcagugaa

SEQ ID NO: 1714 - RNA, 21 nt, Artificial
  Synthetic
uaaaaacaccuaagugacuaa

SEQ ID NO: 1715 - RNA, 21 nt, Artificial
  Synthetic
auguguuuuauuaacuuguga

SEQ ID NO: 1716 - RNA, 21 nt, Artificial
  Synthetic
uguguuuuauuaacuugugua

SEQ ID NO: 1717 - RNA, 23 nt, Artificial
  Synthetic
uccuuugaaaguccuuucaugaa

SEQ ID NO: 1718 - DNA, 23 bp, Artificial
  Synthetic
ugccuutgaaaguccuuucauga

SEQ ID NO: 1719 - DNA, 23 bp, Artificial
  Synthetic
uggccutugaaaguccuuucaug

SEQ ID NO: 1720 - DNA, 23 bp, Artificial
  Synthetic
uuggcctuugaaaguccuuucau

SEQ ID NO: 1721 - RNA, 23 nt, Artificial
  Synthetic
uuuggccuuugaaaguccuuuca

SEQ ID NO: 1722 - RNA, 23 nt, Artificial
  Synthetic
ucuuggccuuugaaaguccuuuc

SEQ ID NO: 1723 - RNA, 23 nt, Artificial
  Synthetic
uccuuggccuuugaaaguccuuu

SEQ ID NO: 1724 - DNA, 23 bp, Artificial
  Synthetic
ugucactugcucuuuggucuucu

SEQ ID NO: 1725 - DNA, 23 bp, Artificial
  Synthetic
uaacautugucacuugcucuuug

SEQ ID NO: 1726 - RNA, 23 nt, Artificial
  Synthetic
uccaacauuugucacuugcucuu

SEQ ID NO: 1727 - RNA, 23 nt, Artificial
  Synthetic
uuccaacauuugucacuugcucu

SEQ ID NO: 1728 - RNA, 23 nt, Artificial
  Synthetic
ucuccaacauuugucacuugcuc

SEQ ID NO: 1729 - RNA, 23 nt, Artificial
  Synthetic
uccuccaacauuugucacuugcu

SEQ ID NO: 1730 - DNA, 23 bp, Artificial
  Synthetic
uggcautucauaagccucauugu

SEQ ID NO: 1731 - DNA, 23 bp, Artificial
  Synthetic
uaggcatuucauaagccucauug

SEQ ID NO: 1732 - RNA, 23 nt, Artificial
  Synthetic
uaaggcauuucauaagccucauu

SEQ ID NO: 1733 - RNA, 23 nt, Artificial
  Synthetic
ugaaggcauuucauaagccucau

SEQ ID NO: 1734 - DNA, 23 bp, Artificial
  Synthetic
ugcacatuggaacugagcacuug

SEQ ID NO: 1735 - RNA, 23 nt, Artificial
  Synthetic
ugggcacauuggaacugagcacu

SEQ ID NO: 1736 - DNA, 23 bp, Artificial
  Synthetic
uaucactgcugauggaagacuuc

SEQ ID NO: 1737 - RNA, 23 nt, Artificial
  Synthetic
uugcuaccauguauucacuucag

SEQ ID NO: 1738 - DNA, 23 bp, Artificial
  Synthetic
uccugctaccauguauucacuuc

SEQ ID NO: 1739 - RNA, 23 nt, Artificial
  Synthetic
uguagucacuuagguguuuuuaa

SEQ ID NO: 1740 - DNA, 23 bp, Artificial
  Synthetic
ugguagtcacuuagguguuuuua

SEQ ID NO: 1741 - RNA, 23 nt, Artificial
  Synthetic
uugguagucacuuagguguuuuu

SEQ ID NO: 1742 - RNA, 23 nt, Artificial
  Synthetic
ugugguagucacuuagguguuuu

SEQ ID NO: 1743 - DNA, 23 bp, Artificial
  Synthetic
uaguggtagucacuuagguguuu

SEQ ID NO: 1744 - RNA, 23 nt, Artificial
  Synthetic
uaagugguagucacuuagguguu

SEQ ID NO: 1745 - RNA, 23 nt, Artificial
  Synthetic
uuaagugguagucacuuaggugu

SEQ ID NO: 1746 - DNA, 23 bp, Artificial
  Synthetic
uauaagtgguagucacuuaggug

SEQ ID NO: 1747 - RNA, 23 nt, Artificial
  Synthetic
uaauaagugguagucacuuaggu

SEQ ID NO: 1748 - DNA, 23 bp, Artificial
  Synthetic
uagaaataagugguagucacuua

SEQ ID NO: 1749 - RNA, 23 nt, Artificial
  Synthetic
uuagaaauaagugguagucacuu

SEQ ID NO: 1750 - RNA, 23 nt, Artificial
  Synthetic
uuuagaaauaagugguagucacu

SEQ ID NO: 1751 - RNA, 23 nt, Artificial
  Synthetic
uuauuuauaggugcauaguuuca

SEQ ID NO: 1752 - DNA, 23 bp, Artificial
  Synthetic
uccauutauauacaaacacaagu

SEQ ID NO: 1753 - RNA, 23 nt, Artificial
  Synthetic
uccuuugaaaguccuuucaugaa

SEQ ID NO: 1754 - RNA, 23 nt, Artificial
  Synthetic
ugccuuugaaaguccuuucauga

SEQ ID NO: 1755 - RNA, 23 nt, Artificial
  Synthetic
uggccuuugaaaguccuuucaug

SEQ ID NO: 1756 - RNA, 23 nt, Artificial
  Synthetic
uuggccuuugaaaguccuuucau

SEQ ID NO: 1757 - RNA, 23 nt, Artificial
  Synthetic
uuuggccuuugaaaguccuuuca

SEQ ID NO: 1758 - RNA, 23 nt, Artificial
  Synthetic
ucuuggccuuugaaaguccuuuc

SEQ ID NO: 1759 - RNA, 23 nt, Artificial
  Synthetic
uccuuggccuuugaaaguccuuu

SEQ ID NO: 1760 - RNA, 23 nt, Artificial
  Synthetic
ugucacuugcucuuuggucuucu

SEQ ID NO: 1761 - RNA, 23 nt, Artificial
  Synthetic
uaacauuugucacuugcucuuug

SEQ ID NO: 1762 - RNA, 23 nt, Artificial
  Synthetic
uccaacauuugucacuugcucuu

SEQ ID NO: 1763 - RNA, 23 nt, Artificial
  Synthetic
uuccaacauuugucacuugcucu

SEQ ID NO: 1764 - RNA, 23 nt, Artificial
  Synthetic
ucuccaacauuugucacuugcuc

SEQ ID NO: 1765 - RNA, 23 nt, Artificial
  Synthetic
uccuccaacauuugucacuugcu

SEQ ID NO: 1766 - RNA, 23 nt, Artificial
  Synthetic
uggcauuucauaagccucauugu

SEQ ID NO: 1767 - RNA, 23 nt, Artificial
  Synthetic
uaggcauuucauaagccucauug

SEQ ID NO: 1768 - RNA, 23 nt, Artificial
  Synthetic
uaaggcauuucauaagccucauu

SEQ ID NO: 1769 - RNA, 23 nt, Artificial
  Synthetic
ugaaggcauuucauaagccucau

SEQ ID NO: 1770 - RNA, 23 nt, Artificial
  Synthetic
uuggaacugagcacuuguacaag

SEQ ID NO: 1771 - RNA, 23 nt, Artificial
  Synthetic
uuuggaacugagcacuuguacaa

SEQ ID NO: 1772 - RNA, 23 nt, Artificial
  Synthetic
ugcacauuggaacugagcacuug

SEQ ID NO: 1773 - RNA, 23 nt, Artificial
  Synthetic
ugggcacauuggaacugagcacu

SEQ ID NO: 1774 - RNA, 23 nt, Artificial
  Synthetic
ucacugcugauggaagacuucaa

SEQ ID NO: 1775 - RNA, 23 nt, Artificial
  Synthetic
uucacugcugauggaagacuuca

SEQ ID NO: 1776 - RNA, 23 nt, Artificial
  Synthetic
uaucacugcugauggaagacuuc

SEQ ID NO: 1777 - RNA, 23 nt, Artificial
  Synthetic
uugcuaccauguauucacuucag

SEQ ID NO: 1778 - RNA, 23 nt, Artificial
  Synthetic
uacugcugauggaagacuucaaa

SEQ ID NO: 1779 - RNA, 23 nt, Artificial
  Synthetic
uuagucacuuagguguuuuuaaa

SEQ ID NO: 1780 - RNA, 23 nt, Artificial
  Synthetic
uguagucacuuagguguuuuuaa

SEQ ID NO: 1781 - RNA, 23 nt, Artificial
  Synthetic
ugguagucacuuagguguuuuua

SEQ ID NO: 1782 - RNA, 23 nt, Artificial
  Synthetic
uugguagucacuuagguguuuuu

SEQ ID NO: 1783 - RNA, 23 nt, Artificial
  Synthetic
ugugguagucacuuagguguuuu

SEQ ID NO: 1784 - RNA, 23 nt, Artificial
  Synthetic
uagugguagucacuuagguguuu

SEQ ID NO: 1785 - RNA, 23 nt, Artificial
  Synthetic
uaagugguagucacuuagguguu

SEQ ID NO: 1786 - RNA, 23 nt, Artificial
  Synthetic
uuaagugguagucacuuaggugu

SEQ ID NO: 1787 - RNA, 23 nt, Artificial
  Synthetic
uauaagugguagucacuuaggug

SEQ ID NO: 1788 - RNA, 23 nt, Artificial
  Synthetic
uaauaagugguagucacuuaggu

SEQ ID NO: 1789 - RNA, 23 nt, Artificial
  Synthetic
uaaauaagugguagucacuuagg

SEQ ID NO: 1790 - RNA, 23 nt, Artificial
  Synthetic
ugaaauaagugguagucacuuag

SEQ ID NO: 1791 - RNA, 23 nt, Artificial
  Synthetic
uagaaauaagugguagucacuua

SEQ ID NO: 1792 - RNA, 23 nt, Artificial
  Synthetic
uuagaaauaagugguagucacuu

SEQ ID NO: 1793 - RNA, 23 nt, Artificial
  Synthetic
uuuagaaauaagugguagucacu

SEQ ID NO: 1794 - RNA, 23 nt, Artificial
  Synthetic
uuauuuauaggugcauaguuuca

SEQ ID NO: 1795 - RNA, 23 nt, Artificial
  Synthetic
ucacaaguuaauaaaacacauca

SEQ ID NO: 1796 - RNA, 23 nt, Artificial
  Synthetic
uacacaaguuaauaaaacacauc

SEQ ID NO: 1797 - RNA, 23 nt, Artificial
  Synthetic
uccauuuauauacaaacacaagu

SEQ ID NO: 1798 - RNA, 23 nt, Artificial
  Synthetic
uuggaacugagcacuuguacaag

SEQ ID NO: 1799 - RNA, 23 nt, Artificial
  Synthetic
uuuggaacugagcacuuguacaa

SEQ ID NO: 1800 - DNA, 23 bp, Artificial
  Synthetic
uacugctgauggaagacuucaaa

SEQ ID NO: 1801 - RNA, 23 nt, Artificial
  Synthetic
ucacugcugauggaagacuucaa

SEQ ID NO: 1802 - RNA, 23 nt, Artificial
  Synthetic
uucacugcugauggaagacuuca

SEQ ID NO: 1803 - RNA, 23 nt, Artificial
  Synthetic
uuagucacuuagguguuuuuaaa

SEQ ID NO: 1804 - RNA, 23 nt, Artificial
  Synthetic
ucacaaguuaauaaaacacauca

SEQ ID NO: 1805 - RNA, 23 nt, Artificial
  Synthetic
uacacaaguuaauaaaacacauc

SEQ ID NO: 1806 - DNA, 1415 bp, Canis lupus
gagccgcgagcgccggcagaggggcggggagaggcgctgacaaatcagctgcgggggcggtgagccgaggagaaggaggagaaagaggaaggggaggaagaccacgacgacttgcaggggacccgagagagggggtgagagaccgagcgcggcagcgtgggggtgagtgtggtgtgaacgaattcattagccatggatgtattcatgaaaggactttcaaaggccaaggagggagtcgtggctgctgctgaaaaaaccaaacagggtgtggcagaagcagcaggaaagacaaaagagggtgtcctctatgtaggctccaaaaccaaggaaggagtggttcatggtgtgacaacagtggctgagaagaccaaagagcaagtgacaaatgttggtgaggccgtggtgacaggggtgacagcagtagcacaaaagacagtggagggagcagggagcatcgcagctgctactggctttggcaaaaaggatcagttgggcaagagtgaagaaggaggcccacaggaaggaattctggaagatatgcctgttgatcctgacaatgaggcatatgaaatgccttctgaggaagggtatcaagactatgaacccgaagcctaagaaatacttttgctcccagtttcttgagacctactgacagatgttccatcctgtacaagtactcagttccaaaatgcccagtcataacattttctcaaaatttttacagtgtattttaaactcttccatcagcagtgattgaagttatctgtaccagcccctactcagcatttcagtgcttccctctcactgaagtgattatatggtagcagggtcctcccttgtgtgctgtgtggatattgtggcttcaaatctaaaatgttaaattaaagcacctaagtgactaccacttatttctaaatcttcactatttttttgttgctgttattgagaagttgtgatttactatcatatattataagatttctaggtgtcttttaatgattatttctgtttaaaaaataatgatgtgttgtgaaatttgttaatatatacaatacttagaaacatgttagcatgaaactatgcacctataaatattaactatgaaattttactgttttgtgatgtgttttattaatttgtgtttatatataaatgctgaaaattaaaatgttatctcattacaaaaatcttatttttaatcccatctcactttaataataaaatcatgcttataacaatatgaactgagaactgacacaattaacttaaagctcttgacagccatttgaaggagaaggaattttagaagaattaagcagacaagatggaacattaatcctttactctggaaattcactgaagcaacactacccaaagtatcctgacatgcagtggtgtcttaagaggttatatgg

SEQ ID NO: 1807 - DNA, 3396 bp, Homo sapiens
ggcgacgaccagaaggggcccaagagagggggcgagcgaccgagcgccgcgacgcggaagtgaggtgcgtgcgggctgcagcgcagaccccggcccggcccctccgagagcgtcctgggcgctccctcacgccttgccttcaagccttctgcctttccaccctcgtgagcggagaactgggagtggccattcgacgacaggttagcgggtttgcctcccactcccccagcctcgcgtcgccggctcacagcggcctcctctggggacagtcccccccgggtgccgcctccgcccttcctgtgcgctccttttccttcttctttcctattaaatattatttgggaattgtttaaattttttttttaaaaaaagagagaggcggggaggagtcggagttgtggagaagcagagggactcagtgtggtgtaaaggaattcattagccatggatgtattcatgaaaggactttcaaaggccaaggagggagttgtggctgctgctgagaaaaccaaacagggtgtggcagaagcagcaggaaagacaaaagagggtgttctctatgtaggctccaaaaccaaggagggagtggtgcatggtgtggcaacagtggctgagaagaccaaagagcaagtgacaaatgttggaggagcagtggtgacgggtgtgacagcagtagcccagaagacagtggagggagcagggagcattgcagcagccactggctttgtcaaaaaggaccagttgggcaagaatgaagaaggagccccacaggaaggaattctggaagatatgcctgtggatcctgacaatgaggcttatgaaatgccttctgaggaagggtatcaagactacgaacctgaagcctaagaaatatctttgctcccagtttcttgagatctgctgacagatgttccatcctgtacaagtgctcagttccaatgtgcccagtcatgacatttctcaaagtttttacagtgtatctcgaagtcttccatcagcagtgattgaagtatctgtacctgcccccactcagcatttcggtgcttccctttcactgaagtgaatacatggtagcagggtctttgtgtgctgtggattttgtggcttcaatctacgatgttaaaacaaattaaaaacacctaagtgactaccacttatttctaaatcctcactatttttttgttgctgttgttcagaagttgttagtgatttgctatcatatattataagatttttaggtgtcttttaatgatactgtctaagaataatgacgtattgtgaaatttgttaatatatataatacttaaaaatatgtgagcatgaaactatgcacctataaatactaaatatgaaattttaccattttgcgatgtgttttattcacttgtgtttgtatataaatggtgagaattaaaataaaacgttatctcattgcaaaaatattttatttttatcccatctcactttaataataaaaatcatgcttataagcaacatgaattaagaactgacacaaaggacaaaaatataaagttattaatagccatttgaagaaggaggaattttagaagaggtagagaaaatggaacattaaccctacactcggaattccctgaagcaacactgccagaagtgtgttttggtatgcactggttccttaagtggctgtgattaattattgaaagtggggtgttgaagaccccaactactattgtagagtggtctatttctcccttcaatcctgtcaatgtttgctttacgtattttggggaactgttgtttgatgtgtatgtgtttataattgttatacatttttaattgagccttttattaacatatattgttatttttgtctcgaaataattttttagttaaaatctattttgtctgatattggtgtgaatgctgtacctttctgacaataaataatattcgaccatgaataaaaaaaaaaaaaaagtgggttcccgggaactaagcagtgtagaagatgattttgactacaccctccttagagagccataagacacattagcacatattagcacattcaaggctctgagagaatgtggttaactttgtttaactcagcattcctcactttttttttttaatcatcagaaattctctctctctctctctctttttctctcgctctctttttttttttttttttacaggaaatgcctttaaacatcgttggaactaccagagtcaccttaaaggagatcaattctctagactgataaaaatttcatggcctcctttaaatgttgccaaatatatgaattctaggatttttccttaggaaaggtttttctctttcagggaagatctattaactccccatgggtgctgaaaataaacttgatggtgaaaaactctgtataaattaatttaaaaattatttggtttctctttttaattattctggggcatagtcatttctaaaagtcactagtagaaagtataatttcaagacagaatattctagacatgctagcagtttatatgtattcatgagtaatgtgatatatattgggcgctggtgaggaaggaaggaggaatgagtgactataaggatggttaccatagaaacttccttttttacctaattgaagagagactactacagagtgctaagctgcatgtgtcatcttacactagagagaaatggtaagtttcttgttttatttaagttatgtttaagcaaggaaaggatttgttattgaacagtatatttcaggaaggttagaaagtggcggttaggatatattttaaatctacctaaagcagcatattttaaaaatttaaaagtattggtattaaattaagaaatagaggacagaactagactgatagcagtgacctagaacaatttgagattaggaaagttgtgaccatgaatttaaggatttatgtggatacaaattctcctttaaagtgtttcttcccttaatatttatctgacggtaatttttgagcagtgaattactttatatatcttaatagtttatttgggaccaaacacttaaacaaaaagttctttaagtcatataagccttttcaggaagcttgtctcatattcactcccgagacattcacctgccaagtggcctgaggatcaatccagtcctaggtttattttgcagacttacattctcccaagttattcagcctcatatgactccacggtcggctttaccaaaacagttcagagtgcactttggcacacaattgggaacagaacaatctaatgtgtggtttggtattccaagtggggtctttttcagaatctctgcactagtgtgagatgcaaacatgtttcctcatctttctggcttatccagtatgtagctatttgtgacataataaatatatacatatatgaaaata

SEQ ID NO: 1808 - DNA, 3030 bp, Homo sapiens
gcttctccattctggtgtgatccaggaacagctgtcttccagctctgaaagagtgtggtgtaaaggaattcattagccatggatgtattcatgaaaggactttcaaaggccaaggagggagttgtggctgctgctgagaaaaccaaacagggtgtggcagaagcagcaggaaagacaaaagagggtgttctctatgtaggctccaaaaccaaggagggagtggtgcatggtgtggcaacagtggctgagaagaccaaagagcaagtgacaaatgttggaggagcagtggtgacgggtgtgacagcagtagcccagaagacagtggagggagcagggagcattgcagcagccactggctttgtcaaaaaggaccagttgggcaagaatgaagaaggagccccacaggaaggaattctggaagatatgcctgtggatcctgacaatgaggcttatgaaatgccttctgaggaagggtatcaagactacgaacctgaagcctaagaaatatctttgctcccagtttcttgagatctgctgacagatgttccatcctgtacaagtgctcagttccaatgtgcccagtcatgacatttctcaaagtttttacagtgtatctcgaagtcttccatcagcagtgattgaagtatctgtacctgcccccactcagcatttcggtgcttccctttcactgaagtgaatacatggtagcagggtctttgtgtgctgtggattttgtggcttcaatctacgatgttaaaacaaattaaaaacacctaagtgactaccacttatttctaaatcctcactatttttttgttgctgttgttcagaagttgttagtgatttgctatcatatattataagatttttaggtgtcttttaatgatactgtctaagaataatgacgtattgtgaaatttgttaatatatataatacttaaaaatatgtgagcatgaaactatgcacctataaatactaaatatgaaattttaccattttgcgatgtgttttattcacttgtgtttgtatataaatggtgagaattaaaataaaacgttatctcattgcaaaaatattttatttttatcccatctcactttaataataaaaatcatgcttataagcaacatgaattaagaactgacacaaaggacaaaaatataaagttattaatagccatttgaagaaggaggaattttagaagaggtagagaaaatggaacattaaccctacactcggaattccctgaagcaacactgccagaagtgtgttttggtatgcactggttccttaagtggctgtgattaattattgaaagtggggtgttgaagaccccaactactattgtagagtggtctatttctcccttcaatcctgtcaatgtttgctttacgtattttggggaactgttgtttgatgtgtatgtgtttataattgttatacatttttaattgagccttttattaacatatattgttatttttgtctcgaaataattttttagttaaaatctattttgtctgatattggtgtgaatgctgtacctttctgacaataaataatattcgaccatgaataaaaaaaaaaaaaaagtgggttcccgggaactaagcagtgtagaagatgattttgactacaccctccttagagagccataagacacattagcacatattagcacattcaaggctctgagagaatgtggttaactttgtttaactcagcattcctcactttttttttttaatcatcagaaattctctctctctctctctctttttctctcgctctctttttttttttttttttacaggaaatgcctttaaacatcgttggaactaccagagtcaccttaaaggagatcaattctctagactgataaaaatttcatggcctcctttaaatgttgccaaatatatgaattctaggatttttccttaggaaaggtttttctctttcagggaagatctattaactccccatgggtgctgaaaataaacttgatggtgaaaaactctgtataaattaatttaaaaattatttggtttctctttttaattattctggggcatagtcatttctaaaagtcactagtagaaagtataatttcaagacagaatattctagacatgctagcagtttatatgtattcatgagtaatgtgatatatattgggcgctggtgaggaaggaaggaggaatgagtgactataaggatggttaccatagaaacttccttttttacctaattgaagagagactactacagagtgctaagctgcatgtgtcatcttacactagagagaaatggtaagtttcttgttttatttaagttatgtttaagcaaggaaaggatttgttattgaacagtatatttcaggaaggttagaaagtggcggttaggatatattttaaatctacctaaagcagcatattttaaaaatttaaaagtattggtattaaattaagaaatagaggacagaactagactgatagcagtgacctagaacaatttgagattaggaaagttgtgaccatgaatttaaggatttatgtggatacaaattctcctttaaagtgtttcttcccttaatatttatctgacggtaatttttgagcagtgaattactttatatatcttaatagtttatttgggaccaaacacttaaacaaaaagttctttaagtcatataagccttttcaggaagcttgtctcatattcactcccgagacattcacctgccaagtggcctgaggatcaatccagtcctaggtttattttgcagacttacattctcccaagttattcagcctcatatgactccacggtcggctttaccaaaacagttcagagtgcactttggcacacaattgggaacagaacaatctaatgtgtggtttggtattccaagtggggtctttttcagaatctctgcactagtgtgagatgcaaacatgtttcctcatctttctggcttatccagtatgtagctatttgtgacataataaatatatacatatatgaaaata

SEQ ID NO: 1809 - DNA, 3177 bp, Homo sapiens
ggcgacgaccagaaggggcccaagagagggggcgagcgaccgagcgccgcgacgcggaagtgaggtgcgtgcgggctgcagcgcagaccccggcccggcccctccgagagcgtcctgggcgctccctcacgccttgccttcaagccttctgcctttccaccctcgtgagcggagaactgggagtggccattcgacgacagtgtggtgtaaaggaattcattagccatggatgtattcatgaaaggactttcaaaggccaaggagggagttgtggctgctgctgagaaaaccaaacagggtgtggcagaagcagcaggaaagacaaaagagggtgttctctatgtaggctccaaaaccaaggagggagtggtgcatggtgtggcaacagtggctgagaagaccaaagagcaagtgacaaatgttggaggagcagtggtgacgggtgtgacagcagtagcccagaagacagtggagggagcagggagcattgcagcagccactggctttgtcaaaaaggaccagttgggcaagaatgaagaaggagccccacaggaaggaattctggaagatatgcctgtggatcctgacaatgaggcttatgaaatgccttctgaggaagggtatcaagactacgaacctgaagcctaagaaatatctttgctcccagtttcttgagatctgctgacagatgttccatcctgtacaagtgctcagttccaatgtgcccagtcatgacatttctcaaagtttttacagtgtatctcgaagtcttccatcagcagtgattgaagtatctgtacctgcccccactcagcatttcggtgcttccctttcactgaagtgaatacatggtagcagggtctttgtgtgctgtggattttgtggcttcaatctacgatgttaaaacaaattaaaaacacctaagtgactaccacttatttctaaatcctcactatttttttgttgctgttgttcagaagttgttagtgatttgctatcatatattataagatttttaggtgtcttttaatgatactgtctaagaataatgacgtattgtgaaatttgttaatatatataatacttaaaaatatgtgagcatgaaactatgcacctataaatactaaatatgaaattttaccattttgcgatgtgttttattcacttgtgtttgtatataaatggtgagaattaaaataaaacgttatctcattgcaaaaatattttatttttatcccatctcactttaataataaaaatcatgcttataagcaacatgaattaagaactgacacaaaggacaaaaatataaagttattaatagccatttgaagaaggaggaattttagaagaggtagagaaaatggaacattaaccctacactcggaattccctgaagcaacactgccagaagtgtgttttggtatgcactggttccttaagtggctgtgattaattattgaaagtggggtgttgaagaccccaactactattgtagagtggtctatttctcccttcaatcctgtcaatgtttgctttacgtattttggggaactgttgtttgatgtgtatgtgtttataattgttatacatttttaattgagccttttattaacatatattgttatttttgtctcgaaataattttttagttaaaatctattttgtctgatattggtgtgaatgctgtacctttctgacaataaataatattcgaccatgaataaaaaaaaaaaaaaagtgggttcccgggaactaagcagtgtagaagatgattttgactacaccctccttagagagccataagacacattagcacatattagcacattcaaggctctgagagaatgtggttaactttgtttaactcagcattcctcactttttttttttaatcatcagaaattctctctctctctctctctttttctctcgctctctttttttttttttttttacaggaaatgcctttaaacatcgttggaactaccagagtcaccttaaaggagatcaattctctagactgataaaaatttcatggcctcctttaaatgttgccaaatatatgaattctaggatttttccttaggaaaggtttttctctttcagggaagatctattaactccccatgggtgctgaaaataaacttgatggtgaaaaactctgtataaattaatttaaaaattatttggtttctctttttaattattctggggcatagtcatttctaaaagtcactagtagaaagtataatttcaagacagaatattctagacatgctagcagtttatatgtattcatgagtaatgtgatatatattgggcgctggtgaggaaggaaggaggaatgagtgactataaggatggttaccatagaaacttccttttttacctaattgaagagagactactacagagtgctaagctgcatgtgtcatcttacactagagagaaatggtaagtttcttgttttatttaagttatgtttaagcaaggaaaggatttgttattgaacagtatatttcaggaaggttagaaagtggcggttaggatatattttaaatctacctaaagcagcatattttaaaaatttaaaagtattggtattaaattaagaaatagaggacagaactagactgatagcagtgacctagaacaatttgagattaggaaagttgtgaccatgaatttaaggatttatgtggatacaaattctcctttaaagtgtttcttcccttaatatttatctgacggtaatttttgagcagtgaattactttatatatcttaatagtttatttgggaccaaacacttaaacaaaaagttctttaagtcatataagccttttcaggaagcttgtctcatattcactcccgagacattcacctgccaagtggcctgaggatcaatccagtcctaggtttattttgcagacttacattctcccaagttattcagcctcatatgactccacggtcggctttaccaaaacagttcagagtgcactttggcacacaattgggaacagaacaatctaatgtgtggtttggtattccaagtggggtctttttcagaatctctgcactagtgtgagatgcaaacatgtttcctcatctttctggcttatccagtatgtagctatttgtgacataataaatatatacatatatgaaaata

SEQ ID NO: 1810 - DNA, 3099 bp, Homo sapiens
gcttctccattctggtgtgatccaggaacagctgtcttccagctctgaaagagggctgagagattaggctgcttctccgggatccgcttttccccgggaaacgcgaggatgctccatggagctgtggtgtaaaggaattcattagccatggatgtattcatgaaaggactttcaaaggccaaggagggagttgtggctgctgctgagaaaaccaaacagggtgtggcagaagcagcaggaaagacaaaagagggtgttctctatgtaggctccaaaaccaaggagggagtggtgcatggtgtggcaacagtggctgagaagaccaaagagcaagtgacaaatgttggaggagcagtggtgacgggtgtgacagcagtagcccagaagacagtggagggagcagggagcattgcagcagccactggctttgtcaaaaaggaccagttgggcaagaatgaagaaggagccccacaggaaggaattctggaagatatgcctgtggatcctgacaatgaggcttatgaaatgccttctgaggaagggtatcaagactacgaacctgaagcctaagaaatatctttgctcccagtttcttgagatctgctgacagatgttccatcctgtacaagtgctcagttccaatgtgcccagtcatgacatttctcaaagtttttacagtgtatctcgaagtcttccatcagcagtgattgaagtatctgtacctgcccccactcagcatttcggtgcttccctttcactgaagtgaatacatggtagcagggtctttgtgtgctgtggattttgtggcttcaatctacgatgttaaaacaaattaaaaacacctaagtgactaccacttatttctaaatcctcactatttttttgttgctgttgttcagaagttgttagtgatttgctatcatatattataagatttttaggtgtcttttaatgatactgtctaagaataatgacgtattgtgaaatttgttaatatatataatacttaaaaatatgtgagcatgaaactatgcacctataaatactaaatatgaaattttaccattttgcgatgtgttttattcacttgtgtttgtatataaatggtgagaattaaaataaaacgttatctcattgcaaaaatattttatttttatcccatctcactttaataataaaaatcatgcttataagcaacatgaattaagaactgacacaaaggacaaaaatataaagttattaatagccatttgaagaaggaggaattttagaagaggtagagaaaatggaacattaaccctacactcggaattccctgaagcaacactgccagaagtgtgttttggtatgcactggttccttaagtggctgtgattaattattgaaagtggggtgttgaagaccccaactactattgtagagtggtctatttctcccttcaatcctgtcaatgtttgctttacgtattttggggaactgttgtttgatgtgtatgtgtttataattgttatacatttttaattgagccttttattaacatatattgttatttttgtctcgaaataattttttagttaaaatctattttgtctgatattggtgtgaatgctgtacctttctgacaataaataatattcgaccatgaataaaaaaaaaaaaaaagtgggttcccgggaactaagcagtgtagaagatgattttgactacaccctccttagagagccataagacacattagcacatattagcacattcaaggctctgagagaatgtggttaactttgtttaactcagcattcctcactttttttttttaatcatcagaaattctctctctctctctctctttttctctcgctctctttttttttttttttttacaggaaatgcctttaaacatcgttggaactaccagagtcaccttaaaggagatcaattctctagactgataaaaatttcatggcctcctttaaatgttgccaaatatatgaattctaggatttttccttaggaaaggtttttctctttcagggaagatctattaactccccatgggtgctgaaaataaacttgatggtgaaaaactctgtataaattaatttaaaaattatttggtttctctttttaattattctggggcatagtcatttctaaaagtcactagtagaaagtataatttcaagacagaatattctagacatgctagcagtttatatgtattcatgagtaatgtgatatatattgggcgctggtgaggaaggaaggaggaatgagtgactataaggatggttaccatagaaacttccttttttacctaattgaagagagactactacagagtgctaagctgcatgtgtcatcttacactagagagaaatggtaagtttcttgttttatttaagttatgtttaagcaaggaaaggatttgttattgaacagtatatttcaggaaggttagaaagtggcggttaggatatattttaaatctacctaaagcagcatattttaaaaatttaaaagtattggtattaaattaagaaatagaggacagaactagactgatagcagtgacctagaacaatttgagattaggaaagttgtgaccatgaatttaaggatttatgtggatacaaattctcctttaaagtgtttcttcccttaatatttatctgacggtaatttttgagcagtgaattactttatatatcttaatagtttatttgggaccaaacacttaaacaaaaagttctttaagtcatataagccttttcaggaagcttgtctcatattcactcccgagacattcacctgccaagtggcctgaggatcaatccagtcctaggtttattttgcagacttacattctcccaagttattcagcctcatatgactccacggtcggctttaccaaaacagttcagagtgcactttggcacacaattgggaacagaacaatctaatgtgtggtttggtattccaagtggggtctttttcagaatctctgcactagtgtgagatgcaaacatgtttcctcatctttctggcttatccagtatgtagctatttgtgacataataaatatatacatatatgaaaata

SEQ ID NO: 1811 - DNA, 3041 bp, Homo sapiens
ggcgacgaccagaaggggcccaagagagggggcgagcgaccgagcgccgcgacgcggaagtgagtgtggtgtaaaggaattcattagccatggatgtattcatgaaaggactttcaaaggccaaggagggagttgtggctgctgctgagaaaaccaaacagggtgtggcagaagcagcaggaaagacaaaagagggtgttctctatgtaggctccaaaaccaaggagggagtggtgcatggtgtggcaacagtggctgagaagaccaaagagcaagtgacaaatgttggaggagcagtggtgacgggtgtgacagcagtagcccagaagacagtggagggagcagggagcattgcagcagccactggctttgtcaaaaaggaccagttgggcaagaatgaagaaggagccccacaggaaggaattctggaagatatgcctgtggatcctgacaatgaggcttatgaaatgccttctgaggaagggtatcaagactacgaacctgaagcctaagaaatatctttgctcccagtttcttgagatctgctgacagatgttccatcctgtacaagtgctcagttccaatgtgcccagtcatgacatttctcaaagtttttacagtgtatctcgaagtcttccatcagcagtgattgaagtatctgtacctgcccccactcagcatttcggtgcttccctttcactgaagtgaatacatggtagcagggtctttgtgtgctgtggattttgtggcttcaatctacgatgttaaaacaaattaaaaacacctaagtgactaccacttatttctaaatcctcactatttttttgttgctgttgttcagaagttgttagtgatttgctatcatatattataagatttttaggtgtcttttaatgatactgtctaagaataatgacgtattgtgaaatttgttaatatatataatacttaaaaatatgtgagcatgaaactatgcacctataaatactaaatatgaaattttaccattttgcgatgtgttttattcacttgtgtttgtatataaatggtgagaattaaaataaaacgttatctcattgcaaaaatattttatttttatcccatctcactttaataataaaaatcatgcttataagcaacatgaattaagaactgacacaaaggacaaaaatataaagttattaatagccatttgaagaaggaggaattttagaagaggtagagaaaatggaacattaaccctacactcggaattccctgaagcaacactgccagaagtgtgttttggtatgcactggttccttaagtggctgtgattaattattgaaagtggggtgttgaagaccccaactactattgtagagtggtctatttctcccttcaatcctgtcaatgtttgctttacgtattttggggaactgttgtttgatgtgtatgtgtttataattgttatacatttttaattgagccttttattaacatatattgttatttttgtctcgaaataattttttagttaaaatctattttgtctgatattggtgtgaatgctgtacctttctgacaataaataatattcgaccatgaataaaaaaaaaaaaaaagtgggttcccgggaactaagcagtgtagaagatgattttgactacaccctccttagagagccataagacacattagcacatattagcacattcaaggctctgagagaatgtggttaactttgtttaactcagcattcctcactttttttttttaatcatcagaaattctctctctctctctctctttttctctcgctctctttttttttttttttttacaggaaatgcctttaaacatcgttggaactaccagagtcaccttaaaggagatcaattctctagactgataaaaatttcatggcctcctttaaatgttgccaaatatatgaattctaggatttttccttaggaaaggtttttctctttcagggaagatctattaactccccatgggtgctgaaaataaacttgatggtgaaaaactctgtataaattaatttaaaaattatttggtttctctttttaattattctggggcatagtcatttctaaaagtcactagtagaaagtataatttcaagacagaatattctagacatgctagcagtttatatgtattcatgagtaatgtgatatatattgggcgctggtgaggaaggaaggaggaatgagtgactataaggatggttaccatagaaacttccttttttacctaattgaagagagactactacagagtgctaagctgcatgtgtcatcttacactagagagaaatggtaagtttcttgttttatttaagttatgtttaagcaaggaaaggatttgttattgaacagtatatttcaggaaggttagaaagtggcggttaggatatattttaaatctacctaaagcagcatattttaaaaatttaaaagtattggtattaaattaagaaatagaggacagaactagactgatagcagtgacctagaacaatttgagattaggaaagttgtgaccatgaatttaaggatttatgtggatacaaattctcctttaaagtgtttcttcccttaatatttatctgacggtaatttttgagcagtgaattactttatatatcttaatagtttatttgggaccaaacacttaaacaaaaagttctttaagtcatataagccttttcaggaagcttgtctcatattcactcccgagacattcacctgccaagtggcctgaggatcaatccagtcctaggtttattttgcagacttacattctcccaagttattcagcctcatatgactccacggtcggctttaccaaaacagttcagagtgcactttggcacacaattgggaacagaacaatctaatgtgtggtttggtattccaagtggggtctttttcagaatctctgcactagtgtgagatgcaaacatgtttcctcatctttctggcttatccagtatgtagctatttgtgacataataaatatatacatatatgaaaata

SEQ ID NO: 1812 - DNA, 3465 bp, Homo sapiens
ggcgacgaccagaaggggcccaagagagggggcgagcgaccgagcgccgcgacgcggaagtgaggtgcgtgcgggctgcagcgcagaccccggcccggcccctccgagagcgtcctgggcgctccctcacgccttgccttcaagccttctgcctttccaccctcgtgagcggagaactgggagtggccattcgacgacaggttagcgggtttgcctcccactcccccagcctcgcgtcgccggctcacagcggcctcctctggggacagtcccccccgggtgccgcctccgcccttcctgtgcgctccttttccttcttctttcctattaaatattatttgggaattgtttaaattttttttttaaaaaaagagagaggcggggaggagtcggagttgtggagaagcagagggactcagggctgagagattaggctgcttctccgggatccgcttttccccgggaaacgcgaggatgctccatggagctgtggtgtaaaggaattcattagccatggatgtattcatgaaaggactttcaaaggccaaggagggagttgtggctgctgctgagaaaaccaaacagggtgtggcagaagcagcaggaaagacaaaagagggtgttctctatgtaggctccaaaaccaaggagggagtggtgcatggtgtggcaacagtggctgagaagaccaaagagcaagtgacaaatgttggaggagcagtggtgacgggtgtgacagcagtagcccagaagacagtggagggagcagggagcattgcagcagccactggctttgtcaaaaaggaccagttgggcaagaatgaagaaggagccccacaggaaggaattctggaagatatgcctgtggatcctgacaatgaggcttatgaaatgccttctgaggaagggtatcaagactacgaacctgaagcctaagaaatatctttgctcccagtttcttgagatctgctgacagatgttccatcctgtacaagtgctcagttccaatgtgcccagtcatgacatttctcaaagtttttacagtgtatctcgaagtcttccatcagcagtgattgaagtatctgtacctgcccccactcagcatttcggtgcttccctttcactgaagtgaatacatggtagcagggtctttgtgtgctgtggattttgtggcttcaatctacgatgttaaaacaaattaaaaacacctaagtgactaccacttatttctaaatcctcactatttttttgttgctgttgttcagaagttgttagtgatttgctatcatatattataagatttttaggtgtcttttaatgatactgtctaagaataatgacgtattgtgaaatttgttaatatatataatacttaaaaatatgtgagcatgaaactatgcacctataaatactaaatatgaaattttaccattttgcgatgtgttttattcacttgtgtttgtatataaatggtgagaattaaaataaaacgttatctcattgcaaaaatattttatttttatcccatctcactttaataataaaaatcatgcttataagcaacatgaattaagaactgacacaaaggacaaaaatataaagttattaatagccatttgaagaaggaggaattttagaagaggtagagaaaatggaacattaaccctacactcggaattccctgaagcaacactgccagaagtgtgttttggtatgcactggttccttaagtggctgtgattaattattgaaagtggggtgttgaagaccccaactactattgtagagtggtctatttctcccttcaatcctgtcaatgtttgctttacgtattttggggaactgttgtttgatgtgtatgtgtttataattgttatacatttttaattgagccttttattaacatatattgttatttttgtctcgaaataattttttagttaaaatctattttgtctgatattggtgtgaatgctgtacctttctgacaataaataatattcgaccatgaataaaaaaaaaaaaaaagtgggttcccgggaactaagcagtgtagaagatgattttgactacaccctccttagagagccataagacacattagcacatattagcacattcaaggctctgagagaatgtggttaactttgtttaactcagcattcctcactttttttttttaatcatcagaaattctctctctctctctctctttttctctcgctctctttttttttttttttttacaggaaatgcctttaaacatcgttggaactaccagagtcaccttaaaggagatcaattctctagactgataaaaatttcatggcctcctttaaatgttgccaaatatatgaattctaggatttttccttaggaaaggtttttctctttcagggaagatctattaactccccatgggtgctgaaaataaacttgatggtgaaaaactctgtataaattaatttaaaaattatttggtttctctttttaattattctggggcatagtcatttctaaaagtcactagtagaaagtataatttcaagacagaatattctagacatgctagcagtttatatgtattcatgagtaatgtgatatatattgggcgctggtgaggaaggaaggaggaatgagtgactataaggatggttaccatagaaacttccttttttacctaattgaagagagactactacagagtgctaagctgcatgtgtcatcttacactagagagaaatggtaagtttcttgttttatttaagttatgtttaagcaaggaaaggatttgttattgaacagtatatttcaggaaggttagaaagtggcggttaggatatattttaaatctacctaaagcagcatattttaaaaatttaaaagtattggtattaaattaagaaatagaggacagaactagactgatagcagtgacctagaacaatttgagattaggaaagttgtgaccatgaatttaaggatttatgtggatacaaattctcctttaaagtgtttcttcccttaatatttatctgacggtaatttttgagcagtgaattactttatatatcttaatagtttatttgggaccaaacacttaaacaaaaagttctttaagtcatataagccttttcaggaagcttgtctcatattcactcccgagacattcacctgccaagtggcctgaggatcaatccagtcctaggtttattttgcagacttacattctcccaagttattcagcctcatatgactccacggtcggctttaccaaaacagttcagagtgcactttggcacacaattgggaacagaacaatctaatgtgtggtttggtattccaagtggggtctttttcagaatctctgcactagtgtgagatgcaaacatgtttcctcatctttctggcttatccagtatgtagctatttgtgacataataaatatatacatatatgaaaata

SEQ ID NO: 1813 - DNA, 3091 bp, Homo sapiens
gagtgtgagcggcgcctgctcagggtagatagctgagggcgggggtggatgttggatggattagaaccatcacacttgggcctgctgtttgcctgagtttgaaccacaccccgatgtggtgtaaaggaattcattagccatggatgtattcatgaaaggactttcaaaggccaaggagggagttgtggctgctgctgagaaaaccaaacagggtgtggcagaagcagcaggaaagacaaaagagggtgttctctatgtaggctccaaaaccaaggagggagtggtgcatggtgtggcaacagtggctgagaagaccaaagagcaagtgacaaatgttggaggagcagtggtgacgggtgtgacagcagtagcccagaagacagtggagggagcagggagcattgcagcagccactggctttgtcaaaaaggaccagttgggcaagaatgaagaaggagccccacaggaaggaattctggaagatatgcctgtggatcctgacaatgaggcttatgaaatgccttctgaggaagggtatcaagactacgaacctgaagcctaagaaatatctttgctcccagtttcttgagatctgctgacagatgttccatcctgtacaagtgctcagttccaatgtgcccagtcatgacatttctcaaagtttttacagtgtatctcgaagtcttccatcagcagtgattgaagtatctgtacctgcccccactcagcatttcggtgcttccctttcactgaagtgaatacatggtagcagggtctttgtgtgctgtggattttgtggcttcaatctacgatgttaaaacaaattaaaaacacctaagtgactaccacttatttctaaatcctcactatttttttgttgctgttgttcagaagttgttagtgatttgctatcatatattataagatttttaggtgtcttttaatgatactgtctaagaataatgacgtattgtgaaatttgttaatatatataatacttaaaaatatgtgagcatgaaactatgcacctataaatactaaatatgaaattttaccattttgcgatgtgttttattcacttgtgtttgtatataaatggtgagaattaaaataaaacgttatctcattgcaaaaatattttatttttatcccatctcactttaataataaaaatcatgcttataagcaacatgaattaagaactgacacaaaggacaaaaatataaagttattaatagccatttgaagaaggaggaattttagaagaggtagagaaaatggaacattaaccctacactcggaattccctgaagcaacactgccagaagtgtgttttggtatgcactggttccttaagtggctgtgattaattattgaaagtggggtgttgaagaccccaactactattgtagagtggtctatttctcccttcaatcctgtcaatgtttgctttacgtattttggggaactgttgtttgatgtgtatgtgtttataattgttatacatttttaattgagccttttattaacatatattgttatttttgtctcgaaataattttttagttaaaatctattttgtctgatattggtgtgaatgctgtacctttctgacaataaataatattcgaccatgaataaaaaaaaaaaaaaagtgggttcccgggaactaagcagtgtagaagatgattttgactacaccctccttagagagccataagacacattagcacatattagcacattcaaggctctgagagaatgtggttaactttgtttaactcagcattcctcactttttttttttaatcatcagaaattctctctctctctctctctttttctctcgctctctttttttttttttttttacaggaaatgcctttaaacatcgttggaactaccagagtcaccttaaaggagatcaattctctagactgataaaaatttcatggcctcctttaaatgttgccaaatatatgaattctaggatttttccttaggaaaggtttttctctttcagggaagatctattaactccccatgggtgctgaaaataaacttgatggtgaaaaactctgtataaattaatttaaaaattatttggtttctctttttaattattctggggcatagtcatttctaaaagtcactagtagaaagtataatttcaagacagaatattctagacatgctagcagtttatatgtattcatgagtaatgtgatatatattgggcgctggtgaggaaggaaggaggaatgagtgactataaggatggttaccatagaaacttccttttttacctaattgaagagagactactacagagtgctaagctgcatgtgtcatcttacactagagagaaatggtaagtttcttgttttatttaagttatgtttaagcaaggaaaggatttgttattgaacagtatatttcaggaaggttagaaagtggcggttaggatatattttaaatctacctaaagcagcatattttaaaaatttaaaagtattggtattaaattaagaaatagaggacagaactagactgatagcagtgacctagaacaatttgagattaggaaagttgtgaccatgaatttaaggatttatgtggatacaaattctcctttaaagtgtttcttcccttaatatttatctgacggtaatttttgagcagtgaattactttatatatcttaatagtttatttgggaccaaacacttaaacaaaaagttctttaagtcatataagccttttcaggaagcttgtctcatattcactcccgagacattcacctgccaagtggcctgaggatcaatccagtcctaggtttattttgcagacttacattctcccaagttattcagcctcatatgactccacggtcggctttaccaaaacagttcagagtgcactttggcacacaattgggaacagaacaatctaatgtgtggtttggtattccaagtggggtctttttcagaatctctgcactagtgtgagatgcaaacatgtttcctcatctttctggcttatccagtatgtagctatttgtgacataataaatatatacatatatgaaaata

SEQ ID NO: 1814 - DNA, 2984 bp, Homo sapiens
gctctaattctctgcaccttctcaagcattgtgcagattggttttctggattatcagcctgaaggacaaaacgaagaaacagccattagctcctgtctcccattgtctgagagctgccactaggatattaacttcctgaaattctgcagaaatctcctcttactttggcactggagatgcccatacgcagaaagcaaaaaggcacagcatatttaaggaagctcataagaaacagtgcatccagaagtggcgagaattggaggaatggacatgagactctaagaaccagcgcctttgatgttccttttgatctgttatgtagctcttcttgtacacagaatgaagaaggagccccacaggaaggaattctggaagatatgcctgtggatcctgacaatgaggcttatgaaatgccttctgaggaagggtatcaagactacgaacctgaagcctaagaaatatctttgctcccagtttcttgagatctgctgacagatgttccatcctgtacaagtgctcagttccaatgtgcccagtcatgacatttctcaaagtttttacagtgtatctcgaagtcttccatcagcagtgattgaagtatctgtacctgcccccactcagcatttcggtgcttccctttcactgaagtgaatacatggtagcagggtctttgtgtgctgtggattttgtggcttcaatctacgatgttaaaacaaattaaaaacacctaagtgactaccacttatttctaaatcctcactatttttttgttgctgttgttcagaagttgttagtgatttgctatcatatattataagatttttaggtgtcttttaatgatactgtctaagaataatgacgtattgtgaaatttgttaatatatataatacttaaaaatatgtgagcatgaaactatgcacctataaatactaaatatgaaattttaccattttgcgatgtgttttattcacttgtgtttgtatataaatggtgagaattaaaataaaacgttatctcattgcaaaaatattttatttttatcccatctcactttaataataaaaatcatgcttataagcaacatgaattaagaactgacacaaaggacaaaaatataaagttattaatagccatttgaagaaggaggaattttagaagaggtagagaaaatggaacattaaccctacactcggaattccctgaagcaacactgccagaagtgtgttttggtatgcactggttccttaagtggctgtgattaattattgaaagtggggtgttgaagaccccaactactattgtagagtggtctatttctcccttcaatcctgtcaatgtttgctttacgtattttggggaactgttgtttgatgtgtatgtgtttataattgttatacatttttaattgagccttttattaacatatattgttatttttgtctcgaaataattttttagttaaaatctattttgtctgatattggtgtgaatgctgtacctttctgacaataaataatattcgaccatgaataaaaaaaaaaaaaaagtgggttcccgggaactaagcagtgtagaagatgattttgactacaccctccttagagagccataagacacattagcacatattagcacattcaaggctctgagagaatgtggttaactttgtttaactcagcattcctcactttttttttttaatcatcagaaattctctctctctctctctctttttctctcgctctctttttttttttttttttacaggaaatgcctttaaacatcgttggaactaccagagtcaccttaaaggagatcaattctctagactgataaaaatttcatggcctcctttaaatgttgccaaatatatgaattctaggatttttccttaggaaaggtttttctctttcagggaagatctattaactccccatgggtgctgaaaataaacttgatggtgaaaaactctgtataaattaatttaaaaattatttggtttctctttttaattattctggggcatagtcatttctaaaagtcactagtagaaagtataatttcaagacagaatattctagacatgctagcagtttatatgtattcatgagtaatgtgatatatattgggcgctggtgaggaaggaaggaggaatgagtgactataaggatggttaccatagaaacttccttttttacctaattgaagagagactactacagagtgctaagctgcatgtgtcatcttacactagagagaaatggtaagtttcttgttttatttaagttatgtttaagcaaggaaaggatttgttattgaacagtatatttcaggaaggttagaaagtggcggttaggatatattttaaatctacctaaagcagcatattttaaaaatttaaaagtattggtattaaattaagaaatagaggacagaactagactgatagcagtgacctagaacaatttgagattaggaaagttgtgaccatgaatttaaggatttatgtggatacaaattctcctttaaagtgtttcttcccttaatatttatctgacggtaatttttgagcagtgaattactttatatatcttaatagtttatttgggaccaaacacttaaacaaaaagttctttaagtcatataagccttttcaggaagcttgtctcatattcactcccgagacattcacctgccaagtggcctgaggatcaatccagtcctaggtttattttgcagacttacattctcccaagttattcagcctcatatgactccacggtcggctttaccaaaacagttcagagtgcactttggcacacaattgggaacagaacaatctaatgtgtggtttggtattccaagtggggtctttttcagaatctctgcactagtgtgagatgcaaacatgtttcctcatctttctggcttatccagtatgtagctatttgtgacataataaatatatacatatatgaaaata

SEQ ID NO: 1815 - DNA, 927 bp, Homo sapiens
gacaaatcagcggtgggggcggagagccgaggagaaggagaaggaggaggactaggaggaggaggacggcgacgaccagaaggggcccaagagagggggcgagcgaccgagcgccgcgacgcggaagtgaggtgcgtgcgggctgcagcgcagaccccggcccggcccctccgagagcgtcctgggcgctccctcacgccttgccttcaagccttctgcctttccaccctcgtgagcggagaactgggagtggccattcgacgacagtgtggtgtaaaggaattcattagccatggatgtattcatgaaaggactttcaaaggccaaggagggagttgtggctgctgctgagaaaaccaaacagggtgtggcagaagcagcaggaaagacaaaagagggtgttctctatgtaggctccaaaaccaaggagggagtggtgcatggtgtggcaacagtggctgagaagaccaaagagcaagtgacaaatgttggaggagcagtggtgacgggtgtgacagcagtagcccagaagacagtggagggagcagggagcattgcagcagccactggctttgtcaaaaaggaccagttgggcaagaagcatccaaaatacaaaccatctaagaggcaagaaaatgtcgtgatgttcctagtgcaagttaaaaagatttgctttcctcaagtcggaaagcccttctcatttttgaggtttttttcttcttttttttttcaagtgaaagcattttggaggagtcaatatccatctttaaaggtagccaggtcacatgtatacatatgtaactaacctgcacaatgtgcacatgtaccctaaaacttaaagtataatttaaaaaaaaagaatttaaataaaaaaagaaaatcagagagaaaaaaaaaaagatgcatgtgcaccctgatactaccatc

SEQ ID NO: 1816 - DNA, 906 bp, Homo sapiens
gaactgggagtggccattcgacgacaggttagcgggtttgcctcccactcccccagcctcgcgtcgccggctcacagcggcctcctctggggacagtcccccccgggtgccgcctccgcccttcctgtgcgctccttttccttcttctttcctattaaatattatttgggaattgtttaaattttttttttaaaaaaagagagaggcggggaggagtcggagttgtggagaagcagagggactcagtgtggtgtaaaggaattcattagccatggatgtattcatgaaaggactttcaaaggccaaggagggagttgtggctgctgctgagaaaaccaaacagggtgtggcagaagcagcaggaaagacaaaagagggtgttctctatgtaggctccaaaaccaaggagggagtggtgcatggtgtggcaacagtggctgagaagaccaaagagcaagtgacaaatgttggaggagcagtggtgacgggtgtgacagcagtagcccagaagacagtggagggagcagggagcattgcagcagccactggctttgtcaaaaaggaccagttgggcaagaagcatccaaaatacaaaccatctaagaggcaagaaaatgtcgtgatgttcctagtgcaagttaaaaagatttgctttcctcaagtcggaaagcccttctcatttttgaggtttttttcttcttttttttttcaagtgaaagcattttggaggagtcaatatccatctttaaaggtagccaggtcacatgtatacatatgtaactaacctgcacaatgtgcacatgtaccctaaaacttaaagtataatttaaaaaaaaagaatttaaataaaaaaagaaaatcagagagaaaaaaaaaaagatgcatgtgcaccctgatactaccatc

SEQ ID NO: 1817 - DNA, 733 bp, Homo sapiens
tctgctagtgggaggagcttgcttctccattctggtgtgatccaggaacagctgtcttccagctctgaaagagtgtggtgtaaaggaattcattagccatggatgtattcatgaaaggactttcaaaggccaaggagggagttgtggctgctgctgagaaaaccaaacagggtgtggcagaagcagcaggaaagacaaaagagggtgttctctatgtaggctccaaaaccaaggagggagtggtgcatggtgtggcaacagtggctgagaagaccaaagagcaagtgacaaatgttggaggagcagtggtgacgggtgtgacagcagtagcccagaagacagtggagggagcagggagcattgcagcagccactggctttgtcaaaaaggaccagttgggcaagaagcatccaaaatacaaaccatctaagaggcaagaaaatgtcgtgatgttcctagtgcaagttaaaaagatttgctttcctcaagtcggaaagcccttctcatttttgaggtttttttcttcttttttttttcaagtgaaagcattttggaggagtcaatatccatctttaaaggtagccaggtcacatgtatacatatgtaactaacctgcacaatgtgcacatgtaccctaaaacttaaagtataatttaaaaaaaaagaatttaaataaaaaaagaaaatcagagagaaaaaaaaaaagatgcatgtgcaccctgatactaccatc

SEQ ID NO: 1818 - DNA, 755 bp, Homo sapiens
ggagaaggaggaggactaggaggaggaggacggcgacgaccagaaggggcccaagagagggggcgagcgaccgagcgccgcgacgcggaagtgagtgtggtgtaaaggaattcattagccatggatgtattcatgaaaggactttcaaaggccaaggagggagttgtggctgctgctgagaaaaccaaacagggtgtggcagaagcagcaggaaagacaaaagagggtgttctctatgtaggctccaaaaccaaggagggagtggtgcatggtgtggcaacagtggctgagaagaccaaagagcaagtgacaaatgttggaggagcagtggtgacgggtgtgacagcagtagcccagaagacagtggagggagcagggagcattgcagcagccactggctttgtcaaaaaggaccagttgggcaagaagcatccaaaatacaaaccatctaagaggcaagaaaatgtcgtgatgttcctagtgcaagttaaaaagatttgctttcctcaagtcggaaagcccttctcatttttgaggtttttttcttcttttttttttcaagtgaaagcattttggaggagtcaatatccatctttaaaggtagccaggtcacatgtatacatatgtaactaacctgcacaatgtgcacatgtaccctaaaacttaaagtataatttaaaaaaaaagaatttaaataaaaaaagaaaatcagagagaaaaaaaaaaagatgcatgtgcaccctgatactaccatc

SEQ ID NO: 1819 - DNA, 742 bp, Homo sapiens
ctgagggcgggggtggatgttggatggattagaaccatcacacttgggcctgctgtttgcctgagtttgaaccacaccccgatgtggtgtaaaggaattcattagccatggatgtattcatgaaaggactttcaaaggccaaggagggagttgtggctgctgctgagaaaaccaaacagggtgtggcagaagcagcaggaaagacaaaagagggtgttctctatgtaggctccaaaaccaaggagggagtggtgcatggtgtggcaacagtggctgagaagaccaaagagcaagtgacaaatgttggaggagcagtggtgacgggtgtgacagcagtagcccagaagacagtggagggagcagggagcattgcagcagccactggctttgtcaaaaaggaccagttgggcaagaagcatccaaaatacaaaccatctaagaggcaagaaaatgtcgtgatgttcctagtgcaagttaaaaagatttgctttcctcaagtcggaaagcccttctcatttttgaggtttttttcttcttttttttttcaagtgaaagcattttggaggagtcaatatccatctttaaaggtagccaggtcacatgtatacatatgtaactaacctgcacaatgtgcacatgtaccctaaaacttaaagtataatttaaaaaaaaagaatttaaataaaaaaagaaaatcagagagaaaaaaaaaaagatgcatgtgcaccctgatactaccatc

SEQ ID NO: 1820 - DNA, 1690 bp, Homo sapiens
ggggagcctaaggaaagagacttgacctggctttcgtcctgcttctgatattcccttctccacaagggctgagagattaggctgcttctccgggatccgcttttccccgggaaacgcgaggatgctccatggagctgtggtgtaaaggaattcattagccatggatgtattcatgaaaggactttcaaaggccaaggagggagttgtggctgctgctgagaaaaccaaacagggtgtggcagaagcagcaggaaagacaaaagagggtgttctctatgtaggctccaaaaccaaggagggagtggtgcatggtgtggcaacagtggctgagaagaccaaagagcaagtgacaaatgttggaggagcagtggtgacgggtgtgacagcagtagcccagaagacagtggagggagcagggagcattgcagcagccactggctttgtcaaaaaggaccagttgggcaagaatgaagaaggagccccacaggaaggaattctggaagatatgcctgtggatcctgacaatgaggcttatgaaatgccttctgaggaagggtatcaagactacgaacctgaagcctaagaaatatctttgctcccagtttcttgagatctgctgacagatgttccatcctgtacaagtgctcagttccaatgtgcccagtcatgacatttctcaaagtttttacagtgtatctcgaagtcttccatcagcagtgattgaagtatctgtacctgcccccactcagcatttcggtgcttccctttcactgaagtgaatacatggtagcagggtctttgtgtgctgtggattttgtggcttcaatctacgatgttaaaacaaattaaaaacacctaagtgactaccacttatttctaaatcctcactatttttttgttgctgttgttcagaagttgttagtgatttgctatcatatattataagatttttaggtgtcttttaatgatactgtctaagaataatgacgtattgtgaaatttgttaatatatataatacttaaaaatatgtgagcatgaaactatgcacctataaatactaaatatgaaattttaccattttgcgatgtgttttattcacttgtgtttgtatataaatggtgagaattaaaataaaacgttatctcattgcaaaaatattttatttttatcccatctcactttaataataaaaatcatgcttataagcaacatgaattaagaactgacacaaaggacaaaaatataaagttattaatagccatttgaagaaggaggaattttagaagaggtagagaaaatggaacattaaccctacactcggaattccctgaagcaacactgccagaagtgtgttttggtatgcactggttccttaagtggctgtgattaattattgaaagtggggtgttgaagaccccaactactattgtagagtggtctatttctcccttcaatcctgtcaatgtttgctttacgtattttggggaactgttgtttgatgtgtatgtgtttataattgttatacatttttaattgagccttttattaacatatattgttatttttgtctcgaaataattttttagttaaaatctattttgtctgatattggtgtgaatgctgtacctttctgacaataaataatattcgaccatgaataaaaaaaaaaaaaaagtgggttcccgggaa

SEQ ID NO: 1821 - RNA, 21 nt, Artificial
  Synthetic
aguuucuugagaucugcugaa

SEQ ID NO: 1822 - RNA, 23 nt, Artificial
  Synthetic
uucagcagaucucaagaaacugg

SEQ ID NO: 1823 - RNA, 21 nt, Artificial
  Synthetic
aagaggguguucucuauguaa

SEQ ID NO: 1824 - RNA, 23 nt, Artificial
  Synthetic
uuacauagagaacacccucuuuu

SEQ ID NO: 1825 - RNA, 21 nt, Artificial
  Synthetic
gacgacagugugguguaaaga

SEQ ID NO: 1826 - RNA, 21 nt, Artificial
  Synthetic
acgacagugugguguaaagga

SEQ ID NO: 1827 - RNA, 21 nt, Artificial
  Synthetic
cgacagugugguguaaaggaa

SEQ ID NO: 1828 - RNA, 21 nt, Artificial
  Synthetic
ugugguguaaaggaauucaua

SEQ ID NO: 1829 - RNA, 21 nt, Artificial
  Synthetic
gguguaaaggaauucauuaga

SEQ ID NO: 1830 - RNA, 21 nt, Artificial
  Synthetic
auuagccauggauguauucaa

SEQ ID NO: 1831 - RNA, 21 nt, Artificial
  Synthetic
uuagccauggauguauucaua

SEQ ID NO: 1832 - RNA, 21 nt, Artificial
  Synthetic
auggauguauucaugaaagga

SEQ ID NO: 1833 - RNA, 21 nt, Artificial
  Synthetic
auucaugaaaggacuuucaaa

SEQ ID NO: 1834 - RNA, 21 nt, Artificial
  Synthetic
ucaugaaaggacuuucaaaga

SEQ ID NO: 1835 - RNA, 21 nt, Artificial
  Synthetic
caugaaaggacuuucaaagga

SEQ ID NO: 1836 - RNA, 21 nt, Artificial
  Synthetic
augaaaggacuuucaaaggca

SEQ ID NO: 1837 - RNA, 21 nt, Artificial
  Synthetic
agaggguguucucuauguaga

SEQ ID NO: 1838 - RNA, 21 nt, Artificial
  Synthetic
gaggguguucucuauguagga

SEQ ID NO: 1839 - RNA, 21 nt, Artificial
  Synthetic
ggguguucucuauguaggcua

SEQ ID NO: 1840 - RNA, 21 nt, Artificial
  Synthetic
uggcugagaagaccaaagaga

SEQ ID NO: 1841 - RNA, 21 nt, Artificial
  Synthetic
ggcugagaagaccaaagagca

SEQ ID NO: 1842 - RNA, 21 nt, Artificial
  Synthetic
gaagaccaaagagcaagugaa

SEQ ID NO: 1843 - RNA, 21 nt, Artificial
  Synthetic
aagagcaagugacaaauguua

SEQ ID NO: 1844 - RNA, 21 nt, Artificial
  Synthetic
agagcaagugacaaauguuga

SEQ ID NO: 1845 - RNA, 21 nt, Artificial
  Synthetic
gagcaagugacaaauguugga

SEQ ID NO: 1846 - RNA, 21 nt, Artificial
  Synthetic
agcaagugacaaauguuggaa

SEQ ID NO: 1847 - RNA, 21 nt, Artificial
  Synthetic
uccugacaaugaggcuuauga

SEQ ID NO: 1848 - RNA, 21 nt, Artificial
  Synthetic
ccugacaaugaggcuuaugaa

SEQ ID NO: 1849 - RNA, 21 nt, Artificial
  Synthetic
cugacaaugaggcuuaugaaa

SEQ ID NO: 1850 - RNA, 21 nt, Artificial
  Synthetic
caaugaggcuuaugaaaugca

SEQ ID NO: 1851 - RNA, 21 nt, Artificial
  Synthetic
aaugaggcuuaugaaaugcca

SEQ ID NO: 1852 - RNA, 21 nt, Artificial
  Synthetic
ggcuuaugaaaugccuucuga

SEQ ID NO: 1853 - RNA, 21 nt, Artificial
  Synthetic
cuuaugaaaugccuucugaga

SEQ ID NO: 1854 - RNA, 21 nt, Artificial
  Synthetic
uuaugaaaugccuucugagga

SEQ ID NO: 1855 - RNA, 21 nt, Artificial
  Synthetic
aaggguaucaagacuacgaaa

SEQ ID NO: 1856 - RNA, 21 nt, Artificial
  Synthetic
aggguaucaagacuacgaaca

SEQ ID NO: 1857 - RNA, 21 nt, Artificial
  Synthetic
guaucaagacuacgaaccuga

SEQ ID NO: 1858 - RNA, 21 nt, Artificial
  Synthetic
accugaagccuaagaaauaua

SEQ ID NO: 1859 - RNA, 21 nt, Artificial
  Synthetic
ccugaagccuaagaaauauca

SEQ ID NO: 1860 - RNA, 21 nt, Artificial
  Synthetic
cugaagccuaagaaauaucua

SEQ ID NO: 1861 - RNA, 21 nt, Artificial
  Synthetic
ugaagccuaagaaauaucuua

SEQ ID NO: 1862 - RNA, 21 nt, Artificial
  Synthetic
gaagccuaagaaauaucuuua

SEQ ID NO: 1863 - RNA, 21 nt, Artificial
  Synthetic
aagccuaagaaauaucuuuga

SEQ ID NO: 1864 - RNA, 21 nt, Artificial
  Synthetic
agccuaagaaauaucuuugca

SEQ ID NO: 1865 - RNA, 21 nt, Artificial
  Synthetic
gccuaagaaauaucuuugcua

SEQ ID NO: 1866 - RNA, 21 nt, Artificial
  Synthetic
ccuaagaaauaucuuugcuca

SEQ ID NO: 1867 - RNA, 21 nt, Artificial
  Synthetic
auaucuuugcucccaguuuca

SEQ ID NO: 1868 - RNA, 21 nt, Artificial
  Synthetic
uaucuuugcucccaguuucua

SEQ ID NO: 1869 - RNA, 21 nt, Artificial
  Synthetic
aucuuugcucccaguuucuua

SEQ ID NO: 1870 - RNA, 21 nt, Artificial
  Synthetic
ucuuugcucccaguuucuuga

SEQ ID NO: 1871 - RNA, 21 nt, Artificial
  Synthetic
cuuugcucccaguuucuugaa

SEQ ID NO: 1872 - RNA, 21 nt, Artificial
  Synthetic
uuugcucccaguuucuugaga

SEQ ID NO: 1873 - RNA, 21 nt, Artificial
  Synthetic
ucccaguuucuugagaucuga

SEQ ID NO: 1874 - RNA, 21 nt, Artificial
  Synthetic
caguuucuugagaucugcuga

SEQ ID NO: 1875 - RNA, 21 nt, Artificial
  Synthetic
aagugcucaguuccaauguga

SEQ ID NO: 1876 - RNA, 21 nt, Artificial
  Synthetic
agugcucaguuccaaugugca

SEQ ID NO: 1877 - RNA, 21 nt, Artificial
  Synthetic
ugcccagucaugacauuucua

SEQ ID NO: 1878 - RNA, 21 nt, Artificial
  Synthetic
gcccagucaugacauuucuca

SEQ ID NO: 1879 - RNA, 21 nt, Artificial
  Synthetic
cccagucaugacauuucucaa

SEQ ID NO: 1880 - RNA, 21 nt, Artificial
  Synthetic
ccagucaugacauuucucaaa

SEQ ID NO: 1881 - RNA, 21 nt, Artificial
  Synthetic
gucaugacauuucucaaagua

SEQ ID NO: 1882 - RNA, 21 nt, Artificial
  Synthetic
caugacauuucucaaaguuua

SEQ ID NO: 1883 - RNA, 21 nt, Artificial
  Synthetic
ucgaagucuuccaucagcaga

SEQ ID NO: 1884 - RNA, 21 nt, Artificial
  Synthetic
ucuuccaucagcagugauuga

SEQ ID NO: 1885 - RNA, 21 nt, Artificial
  Synthetic
uccaucagcagugauugaaga

SEQ ID NO: 1886 - RNA, 21 nt, Artificial
  Synthetic
ccaucagcagugauugaagua

SEQ ID NO: 1887 - RNA, 21 nt, Artificial
  Synthetic
aucagcagugauugaaguaua

SEQ ID NO: 1888 - RNA, 21 nt, Artificial
  Synthetic
agcagugauugaaguaucuga

SEQ ID NO: 1889 - RNA, 21 nt, Artificial
  Synthetic
gcagugauugaaguaucugua

SEQ ID NO: 1890 - RNA, 21 nt, Artificial
  Synthetic
gauugaaguaucuguaccuga

SEQ ID NO: 1891 - RNA, 21 nt, Artificial
  Synthetic
uucggugcuucccuuucacua

SEQ ID NO: 1892 - RNA, 21 nt, Artificial
  Synthetic
ucggugcuucccuuucacuga

SEQ ID NO: 1893 - RNA, 21 nt, Artificial
  Synthetic
cuucccuuucacugaagugaa

SEQ ID NO: 1894 - RNA, 21 nt, Artificial
  Synthetic
uuucacugaagugaauacaua

SEQ ID NO: 1895 - RNA, 21 nt, Artificial
  Synthetic
uucacugaagugaauacauga

SEQ ID NO: 1896 - RNA, 21 nt, Artificial
  Synthetic
cacugaagugaauacauggua

SEQ ID NO: 1897 - RNA, 21 nt, Artificial
  Synthetic
acugaagugaauacaugguaa

SEQ ID NO: 1898 - RNA, 21 nt, Artificial
  Synthetic
cugaagugaauacaugguaga

SEQ ID NO: 1899 - RNA, 21 nt, Artificial
  Synthetic
cuaagugacuaccacuuauua

SEQ ID NO: 1900 - RNA, 21 nt, Artificial
  Synthetic
uaagugacuaccacuuauuua

SEQ ID NO: 1901 - RNA, 21 nt, Artificial
  Synthetic
aagugacuaccacuuauuuca

SEQ ID NO: 1902 - RNA, 21 nt, Artificial
  Synthetic
agugacuaccacuuauuucua

SEQ ID NO: 1903 - RNA, 21 nt, Artificial
  Synthetic
gugacuaccacuuauuucuaa

SEQ ID NO: 1904 - RNA, 21 nt, Artificial
  Synthetic
ugacuaccacuuauuucuaaa

SEQ ID NO: 1905 - RNA, 21 nt, Artificial
  Synthetic
acuaccacuuauuucuaaaua

SEQ ID NO: 1906 - RNA, 21 nt, Artificial
  Synthetic
cuaccacuuauuucuaaauca

SEQ ID NO: 1907 - RNA, 21 nt, Artificial
  Synthetic
accacuuauuucuaaauccua

SEQ ID NO: 1908 - RNA, 21 nt, Artificial
  Synthetic
uugcuguuguucagaaguuga

SEQ ID NO: 1909 - RNA, 21 nt, Artificial
  Synthetic
ugcuguuguucagaaguugua

SEQ ID NO: 1910 - RNA, 21 nt, Artificial
  Synthetic
gcuguuguucagaaguuguua

SEQ ID NO: 1911 - RNA, 21 nt, Artificial
  Synthetic
cuguuguucagaaguuguuaa

SEQ ID NO: 1912 - RNA, 21 nt, Artificial
  Synthetic
uguuguucagaaguuguuaga

SEQ ID NO: 1913 - RNA, 21 nt, Artificial
  Synthetic
guuguucagaaguuguuagua

SEQ ID NO: 1914 - RNA, 21 nt, Artificial
  Synthetic
uuguucagaaguuguuaguga

SEQ ID NO: 1915 - RNA, 21 nt, Artificial
  Synthetic
uguucagaaguuguuagugaa

SEQ ID NO: 1916 - RNA, 21 nt, Artificial
  Synthetic
cagaaguuguuagugauuuga

SEQ ID NO: 1917 - RNA, 21 nt, Artificial
  Synthetic
gaaguuguuagugauuugcua

SEQ ID NO: 1918 - RNA, 21 nt, Artificial
  Synthetic
aaguuguuagugauuugcuaa

SEQ ID NO: 1919 - RNA, 21 nt, Artificial
  Synthetic
aguuguuagugauuugcuaua

SEQ ID NO: 1920 - RNA, 21 nt, Artificial
  Synthetic
gauacugucuaagaauaauga

SEQ ID NO: 1921 - RNA, 21 nt, Artificial
  Synthetic
auacugucuaagaauaaugaa

SEQ ID NO: 1922 - RNA, 21 nt, Artificial
  Synthetic
acguauugugaaauuuguuaa

SEQ ID NO: 1923 - RNA, 21 nt, Artificial
  Synthetic
uaugugagcaugaaacuauga

SEQ ID NO: 1924 - RNA, 21 nt, Artificial
  Synthetic
ugugagcaugaaacuaugcaa

SEQ ID NO: 1925 - RNA, 21 nt, Artificial
  Synthetic
gaaacuaugcaccuauaaaua

SEQ ID NO: 1926 - RNA, 21 nt, Artificial
  Synthetic
aaacuaugcaccuauaaauaa

SEQ ID NO: 1927 - RNA, 21 nt, Artificial
  Synthetic
aacuaugcaccuauaaauaca

SEQ ID NO: 1928 - RNA, 21 nt, Artificial
  Synthetic
acuaugcaccuauaaauacua

SEQ ID NO: 1929 - RNA, 21 nt, Artificial
  Synthetic
cuaugcaccuauaaauacuaa

SEQ ID NO: 1930 - RNA, 21 nt, Artificial
  Synthetic
cuuguguuuguauauaaauga

SEQ ID NO: 1931 - RNA, 21 nt, Artificial
  Synthetic
uuguguuuguauauaaaugga

SEQ ID NO: 1932 - RNA, 21 nt, Artificial
  Synthetic
uguguuuguauauaaauggua

SEQ ID NO: 1933 - RNA, 21 nt, Artificial
  Synthetic
guguuuguauauaaaugguga

SEQ ID NO: 1934 - RNA, 21 nt, Artificial
  Synthetic
uguuuguauauaaauggugaa

SEQ ID NO: 1935 - RNA, 21 nt, Artificial
  Synthetic
uaucccaucucacuuuaauaa

SEQ ID NO: 1936 - RNA, 21 nt, Artificial
  Synthetic
aucccaucucacuuuaauaaa

SEQ ID NO: 1937 - RNA, 21 nt, Artificial
  Synthetic
ucccaucucacuuuaauaaua

SEQ ID NO: 1938 - RNA, 21 nt, Artificial
  Synthetic
cccaucucacuuuaauaauaa

SEQ ID NO: 1939 - RNA, 21 nt, Artificial
  Synthetic
gcacauauuagcacauucaaa

SEQ ID NO: 1940 - RNA, 21 nt, Artificial
  Synthetic
auauuagcacauucaaggcua

SEQ ID NO: 1941 - RNA, 21 nt, Artificial
  Synthetic
uacaggaaaugccuuuaaaca

SEQ ID NO: 1942 - RNA, 21 nt, Artificial
  Synthetic
acaggaaaugccuuuaaacaa

SEQ ID NO: 1943 - RNA, 21 nt, Artificial
  Synthetic
cuuuaaauguugccaaauaua

SEQ ID NO: 1944 - RNA, 21 nt, Artificial
  Synthetic
uuuaaauguugccaaauauaa

SEQ ID NO: 1945 - RNA, 21 nt, Artificial
  Synthetic
uugccaaauauaugaauucua

SEQ ID NO: 1946 - RNA, 21 nt, Artificial
  Synthetic
ugccaaauauaugaauucuaa

SEQ ID NO: 1947 - RNA, 21 nt, Artificial
  Synthetic
gccaaauauaugaauucuaga

SEQ ID NO: 1948 - RNA, 21 nt, Artificial
  Synthetic
ccaaauauaugaauucuagga

SEQ ID NO: 1949 - RNA, 21 nt, Artificial
  Synthetic
caaauauaugaauucuaggaa

SEQ ID NO: 1950 - RNA, 21 nt, Artificial
  Synthetic
aaauauaugaauucuaggaua

SEQ ID NO: 1951 - RNA, 21 nt, Artificial
  Synthetic
uuucagggaagaucuauuaaa

SEQ ID NO: 1952 - RNA, 21 nt, Artificial
  Synthetic
uucagggaagaucuauuaaca

SEQ ID NO: 1953 - RNA, 21 nt, Artificial
  Synthetic
ucagggaagaucuauuaacua

SEQ ID NO: 1954 - RNA, 21 nt, Artificial
  Synthetic
cagggaagaucuauuaacuca

SEQ ID NO: 1955 - RNA, 21 nt, Artificial
  Synthetic
ucacuaguagaaaguauaaua

SEQ ID NO: 1956 - RNA, 21 nt, Artificial
  Synthetic
cuaguagaaaguauaauuuca

SEQ ID NO: 1957 - RNA, 21 nt, Artificial
  Synthetic
uucaagacagaauauucuaga

SEQ ID NO: 1958 - RNA, 21 nt, Artificial
  Synthetic
ucaagacagaauauucuagaa

SEQ ID NO: 1959 - RNA, 21 nt, Artificial
  Synthetic
uauucuagacaugcuagcaga

SEQ ID NO: 1960 - RNA, 21 nt, Artificial
  Synthetic
uagacaugcuagcaguuuaua

SEQ ID NO: 1961 - RNA, 21 nt, Artificial
  Synthetic
agacaugcuagcaguuuauaa

SEQ ID NO: 1962 - RNA, 21 nt, Artificial
  Synthetic
gacaugcuagcaguuuauaua

SEQ ID NO: 1963 - RNA, 21 nt, Artificial
  Synthetic
acaugcuagcaguuuauauga

SEQ ID NO: 1964 - RNA, 21 nt, Artificial
  Synthetic
caugcuagcaguuuauaugua

SEQ ID NO: 1965 - RNA, 21 nt, Artificial
  Synthetic
augcuagcaguuuauauguaa

SEQ ID NO: 1966 - RNA, 21 nt, Artificial
  Synthetic
ugcuagcaguuuauauguaua

SEQ ID NO: 1967 - RNA, 21 nt, Artificial
  Synthetic
gcuagcaguuuauauguauua

SEQ ID NO: 1968 - RNA, 21 nt, Artificial
  Synthetic
uagcaguuuauauguauucaa

SEQ ID NO: 1969 - RNA, 21 nt, Artificial
  Synthetic
agcaguuuauauguauucaua

SEQ ID NO: 1970 - RNA, 21 nt, Artificial
  Synthetic
gcaguuuauauguauucauga

SEQ ID NO: 1971 - RNA, 21 nt, Artificial
  Synthetic
aguaaugugauauauauugga

SEQ ID NO: 1972 - RNA, 21 nt, Artificial
  Synthetic
gaggaaugagugacuauaaga

SEQ ID NO: 1973 - RNA, 21 nt, Artificial
  Synthetic
aggaaugagugacuauaagga

SEQ ID NO: 1974 - RNA, 21 nt, Artificial
  Synthetic
ggaaugagugacuauaaggaa

SEQ ID NO: 1975 - RNA, 21 nt, Artificial
  Synthetic
gaaugagugacuauaaggaua

SEQ ID NO: 1976 - RNA, 21 nt, Artificial
  Synthetic
aaugagugacuauaaggauga

SEQ ID NO: 1977 - RNA, 21 nt, Artificial
  Synthetic
gagugacuauaaggaugguua

SEQ ID NO: 1978 - RNA, 21 nt, Artificial
  Synthetic
ugacuauaaggaugguuacca

SEQ ID NO: 1979 - RNA, 21 nt, Artificial
  Synthetic
gacuauaaggaugguuaccaa

SEQ ID NO: 1980 - RNA, 21 nt, Artificial
  Synthetic
acuauaaggaugguuaccaua

SEQ ID NO: 1981 - RNA, 21 nt, Artificial
  Synthetic
gaugguuaccauagaaacuua

SEQ ID NO: 1982 - RNA, 21 nt, Artificial
  Synthetic
guuaccauagaaacuuccuua

SEQ ID NO: 1983 - RNA, 21 nt, Artificial
  Synthetic
uuaccauagaaacuuccuuua

SEQ ID NO: 1984 - RNA, 21 nt, Artificial
  Synthetic
uacuacagagugcuaagcuga

SEQ ID NO: 1985 - RNA, 21 nt, Artificial
  Synthetic
agagugcuaagcugcauguga

SEQ ID NO: 1986 - RNA, 21 nt, Artificial
  Synthetic
gagugcuaagcugcaugugua

SEQ ID NO: 1987 - RNA, 21 nt, Artificial
  Synthetic
uaagcugcaugugucaucuua

SEQ ID NO: 1988 - RNA, 21 nt, Artificial
  Synthetic
gcugcaugugucaucuuacaa

SEQ ID NO: 1989 - RNA, 21 nt, Artificial
  Synthetic
cugcaugugucaucuuacaca

SEQ ID NO: 1990 - RNA, 21 nt, Artificial
  Synthetic
ugcaugugucaucuuacacua

SEQ ID NO: 1991 - RNA, 21 nt, Artificial
  Synthetic
uagagagaaaugguaaguuua

SEQ ID NO: 1992 - RNA, 21 nt, Artificial
  Synthetic
gagagaaaugguaaguuucua

SEQ ID NO: 1993 - RNA, 21 nt, Artificial
  Synthetic
agagaaaugguaaguuucuua

SEQ ID NO: 1994 - RNA, 21 nt, Artificial
  Synthetic
gagaaaugguaaguuucuuga

SEQ ID NO: 1995 - RNA, 21 nt, Artificial
  Synthetic
agaaaugguaaguuucuugua

SEQ ID NO: 1996 - RNA, 21 nt, Artificial
  Synthetic
gaaaugguaaguuucuuguua

SEQ ID NO: 1997 - RNA, 21 nt, Artificial
  Synthetic
aaaugguaaguuucuuguuua

SEQ ID NO: 1998 - RNA, 21 nt, Artificial
  Synthetic
uauugaacaguauauuucaga

SEQ ID NO: 1999 - RNA, 21 nt, Artificial
  Synthetic
auugaacaguauauuucagga

SEQ ID NO: 2000 - RNA, 21 nt, Artificial
  Synthetic
caguauauuucaggaagguua

SEQ ID NO: 2001 - RNA, 21 nt, Artificial
  Synthetic
cuaccuaaagcagcauauuua

SEQ ID NO: 2002 - RNA, 21 nt, Artificial
  Synthetic
aaguugugaccaugaauuuaa

SEQ ID NO: 2003 - RNA, 21 nt, Artificial
  Synthetic
auuuauguggauacaaauuca

SEQ ID NO: 2004 - RNA, 21 nt, Artificial
  Synthetic
uuuauguggauacaaauucua

SEQ ID NO: 2005 - RNA, 21 nt, Artificial
  Synthetic
uuauguggauacaaauucuca

SEQ ID NO: 2006 - RNA, 21 nt, Artificial
  Synthetic
auguggauacaaauucuccua

SEQ ID NO: 2007 - RNA, 21 nt, Artificial
  Synthetic
ggauacaaauucuccuuuaaa

SEQ ID NO: 2008 - RNA, 21 nt, Artificial
  Synthetic
auacaaauucuccuuuaaaga

SEQ ID NO: 2009 - RNA, 21 nt, Artificial
  Synthetic
uacaaauucuccuuuaaagua

SEQ ID NO: 2010 - RNA, 21 nt, Artificial
  Synthetic
acaaauucuccuuuaaaguga

SEQ ID NO: 2011 - RNA, 21 nt, Artificial
  Synthetic
caaauucuccuuuaaagugua

SEQ ID NO: 2012 - RNA, 21 nt, Artificial
  Synthetic
aauucuccuuuaaaguguuua

SEQ ID NO: 2013 - RNA, 21 nt, Artificial
  Synthetic
uucuccuuuaaaguguuucua

SEQ ID NO: 2014 - RNA, 21 nt, Artificial
  Synthetic
ucuccuuuaaaguguuucuua

SEQ ID NO: 2015 - RNA, 21 nt, Artificial
  Synthetic
cuccuuuaaaguguuucuuca

SEQ ID NO: 2016 - RNA, 21 nt, Artificial
  Synthetic
uccuuuaaaguguuucuucca

SEQ ID NO: 2017 - RNA, 21 nt, Artificial
  Synthetic
ccuuuaaaguguuucuuccca

SEQ ID NO: 2018 - RNA, 21 nt, Artificial
  Synthetic
uuuaaaguguuucuucccuua

SEQ ID NO: 2019 - RNA, 21 nt, Artificial
  Synthetic
aaguguuucuucccuuaauaa

SEQ ID NO: 2020 - RNA, 21 nt, Artificial
  Synthetic
aguguuucuucccuuaauaua

SEQ ID NO: 2021 - RNA, 21 nt, Artificial
  Synthetic
guguuucuucccuuaauauua

SEQ ID NO: 2022 - RNA, 21 nt, Artificial
  Synthetic
guuucuucccuuaauauuuaa

SEQ ID NO: 2023 - RNA, 21 nt, Artificial
  Synthetic
uucuucccuuaauauuuauca

SEQ ID NO: 2024 - RNA, 21 nt, Artificial
  Synthetic
cuucccuuaauauuuaucuga

SEQ ID NO: 2025 - RNA, 21 nt, Artificial
  Synthetic
cuuacauucucccaaguuaua

SEQ ID NO: 2026 - RNA, 21 nt, Artificial
  Synthetic
uuacauucucccaaguuauua

SEQ ID NO: 2027 - RNA, 21 nt, Artificial
  Synthetic
uacauucucccaaguuauuca

SEQ ID NO: 2028 - RNA, 21 nt, Artificial
  Synthetic
acauucucccaaguuauucaa

SEQ ID NO: 2029 - RNA, 21 nt, Artificial
  Synthetic
cauucucccaaguuauucaga

SEQ ID NO: 2030 - RNA, 21 nt, Artificial
  Synthetic
auucucccaaguuauucagca

SEQ ID NO: 2031 - RNA, 21 nt, Artificial
  Synthetic
aaguuauucagccucauauga

SEQ ID NO: 2032 - RNA, 21 nt, Artificial
  Synthetic
aguuauucagccucauaugaa

SEQ ID NO: 2033 - RNA, 21 nt, Artificial
  Synthetic
guuauucagccucauaugaca

SEQ ID NO: 2034 - RNA, 21 nt, Artificial
  Synthetic
acaguucagagugcacuuuga

SEQ ID NO: 2035 - RNA, 21 nt, Artificial
  Synthetic
caguucagagugcacuuugga

SEQ ID NO: 2036 - RNA, 21 nt, Artificial
  Synthetic
guucagagugcacuuuggcaa

SEQ ID NO: 2037 - RNA, 21 nt, Artificial
  Synthetic
ugcacuuuggcacacaauuga

SEQ ID NO: 2038 - RNA, 21 nt, Artificial
  Synthetic
aacagaacaaucuaaugugua

SEQ ID NO: 2039 - RNA, 21 nt, Artificial
  Synthetic
acagaacaaucuaauguguga

SEQ ID NO: 2040 - RNA, 21 nt, Artificial
  Synthetic
cagaacaaucuaaugugugga

SEQ ID NO: 2041 - RNA, 21 nt, Artificial
  Synthetic
agaacaaucuaauguguggua

SEQ ID NO: 2042 - RNA, 21 nt, Artificial
  Synthetic
acaaucuaaugugugguuuga

SEQ ID NO: 2043 - RNA, 21 nt, Artificial
  Synthetic
caaucuaaugugugguuugga

SEQ ID NO: 2044 - RNA, 21 nt, Artificial
  Synthetic
aaucuaaugugugguuuggua

SEQ ID NO: 2045 - RNA, 21 nt, Artificial
  Synthetic
aucuaaugugugguuugguaa

SEQ ID NO: 2046 - RNA, 21 nt, Artificial
  Synthetic
ucuaaugugugguuugguaua

SEQ ID NO: 2047 - RNA, 21 nt, Artificial
  Synthetic
uaaugugugguuugguauuca

SEQ ID NO: 2048 - RNA, 21 nt, Artificial
  Synthetic
aaugugugguuugguauucca

SEQ ID NO: 2049 - RNA, 21 nt, Artificial
  Synthetic
augugugguuugguauuccaa

SEQ ID NO: 2050 - RNA, 21 nt, Artificial
  Synthetic
gugugguuugguauuccaaga

SEQ ID NO: 2051 - RNA, 21 nt, Artificial
  Synthetic
gugugguguaaaggaauucaa

SEQ ID NO: 2052 - RNA, 21 nt, Artificial
  Synthetic
gugguguaaaggaauucauua

SEQ ID NO: 2053 - RNA, 21 nt, Artificial
  Synthetic
agccauggauguauucaugaa

SEQ ID NO: 2054 - RNA, 21 nt, Artificial
  Synthetic
uggauguauucaugaaaggaa

SEQ ID NO: 2055 - RNA, 21 nt, Artificial
  Synthetic
auucaugaaaggacuuucaaa

SEQ ID NO: 2056 - RNA, 21 nt, Artificial
  Synthetic
augaaaggacuuucaaaggca

SEQ ID NO: 2057 - RNA, 21 nt, Artificial
  Synthetic
ugaaaggacuuucaaaggcca

SEQ ID NO: 2058 - RNA, 21 nt, Artificial
  Synthetic
ggguguucucuauguaggcua

SEQ ID NO: 2059 - RNA, 21 nt, Artificial
  Synthetic
ggcugagaagaccaaagagca

SEQ ID NO: 2060 - RNA, 21 nt, Artificial
  Synthetic
gaagaccaaagagcaagugaa

SEQ ID NO: 2061 - RNA, 21 nt, Artificial
  Synthetic
ccugacaaugaggcuuaugaa

SEQ ID NO: 2062 - RNA, 21 nt, Artificial
  Synthetic
caaugaggcuuaugaaaugca

SEQ ID NO: 2063 - RNA, 21 nt, Artificial
  Synthetic
aaugaggcuuaugaaaugcca

SEQ ID NO: 2064 - RNA, 21 nt, Artificial
  Synthetic
ugaaaugccuucugaggaaga

SEQ ID NO: 2065 - RNA, 21 nt, Artificial
  Synthetic
aaggguaucaagacuacgaaa

SEQ ID NO: 2066 - RNA, 21 nt, Artificial
  Synthetic
aggguaucaagacuacgaaca

SEQ ID NO: 2067 - RNA, 21 nt, Artificial
  Synthetic
accugaagccuaagaaauaua

SEQ ID NO: 2068 - RNA, 21 nt, Artificial
  Synthetic
cugaagccuaagaaauaucua

SEQ ID NO: 2069 - RNA, 21 nt, Artificial
  Synthetic
gaagccuaagaaauaucuuua

SEQ ID NO: 2070 - RNA, 21 nt, Artificial
  Synthetic
cuaagaaauaucuuugcucca

SEQ ID NO: 2071 - RNA, 21 nt, Artificial
  Synthetic
auaucuuugcucccaguuuca

SEQ ID NO: 2072 - RNA, 21 nt, Artificial
  Synthetic
uugcucccaguuucuugagaa

SEQ ID NO: 2073 - RNA, 21 nt, Artificial
  Synthetic
ugcucccaguuucuugagaua

SEQ ID NO: 2074 - RNA, 21 nt, Artificial
  Synthetic
cuguacaagugcucaguucca

SEQ ID NO: 2075 - RNA, 21 nt, Artificial
  Synthetic
guacaagugcucaguuccaaa

SEQ ID NO: 2076 - RNA, 21 nt, Artificial
  Synthetic
ccagucaugacauuucucaaa

SEQ ID NO: 2077 - RNA, 21 nt, Artificial
  Synthetic
ucuuccaucagcagugauuga

SEQ ID NO: 2078 - RNA, 21 nt, Artificial
  Synthetic
uuccaucagcagugauugaaa

SEQ ID NO: 2079 - RNA, 21 nt, Artificial
  Synthetic
ccaucagcagugauugaagua

SEQ ID NO: 2080 - RNA, 21 nt, Artificial
  Synthetic
aucagcagugauugaaguaua

SEQ ID NO: 2081 - RNA, 21 nt, Artificial
  Synthetic
gcagugauugaaguaucugua

SEQ ID NO: 2082 - RNA, 21 nt, Artificial
  Synthetic
cuucccuuucacugaagugaa

SEQ ID NO: 2083 - RNA, 21 nt, Artificial
  Synthetic
uucacugaagugaauacauga

SEQ ID NO: 2084 - RNA, 21 nt, Artificial
  Synthetic
ucacugaagugaauacaugga

SEQ ID NO: 2085 - RNA, 21 nt, Artificial
  Synthetic
acugaagugaauacaugguaa

SEQ ID NO: 2086 - RNA, 21 nt, Artificial
  Synthetic
cuaccacuuauuucuaaauca

SEQ ID NO: 2087 - RNA, 21 nt, Artificial
  Synthetic
uaccacuuauuucuaaaucca

SEQ ID NO: 2088 - RNA, 21 nt, Artificial
  Synthetic
ccacuuauuucuaaauccuca

SEQ ID NO: 2089 - RNA, 21 nt, Artificial
  Synthetic
aguuguuagugauuugcuaua

SEQ ID NO: 2090 - RNA, 21 nt, Artificial
  Synthetic
auacugucuaagaauaaugaa

SEQ ID NO: 2091 - RNA, 21 nt, Artificial
  Synthetic
auaugugagcaugaaacuaua

SEQ ID NO: 2092 - RNA, 21 nt, Artificial
  Synthetic
uaugugagcaugaaacuauga

SEQ ID NO: 2093 - RNA, 21 nt, Artificial
  Synthetic
ugugagcaugaaacuaugcaa

SEQ ID NO: 2094 - RNA, 21 nt, Artificial
  Synthetic
aacuaugcaccuauaaauaca

SEQ ID NO: 2095 - RNA, 21 nt, Artificial
  Synthetic
cuaugcaccuauaaauacuaa

SEQ ID NO: 2096 - RNA, 21 nt, Artificial
  Synthetic
uguuuguauauaaauggugaa

SEQ ID NO: 2097 - RNA, 21 nt, Artificial
  Synthetic
cccaucucacuuuaauaauaa

SEQ ID NO: 2098 - RNA, 21 nt, Artificial
  Synthetic
auauuagcacauucaaggcua

SEQ ID NO: 2099 - RNA, 21 nt, Artificial
  Synthetic
cuuuaaauguugccaaauaua

SEQ ID NO: 2100 - RNA, 21 nt, Artificial
  Synthetic
aaauauaugaauucuaggaua

SEQ ID NO: 2101 - RNA, 21 nt, Artificial
  Synthetic
ucuuucagggaagaucuauua

SEQ ID NO: 2102 - RNA, 21 nt, Artificial
  Synthetic
gaauauucuagacaugcuaga

SEQ ID NO: 2103 - RNA, 21 nt, Artificial
  Synthetic
uauucuagacaugcuagcaga

SEQ ID NO: 2104 - RNA, 21 nt, Artificial
  Synthetic
cuagacaugcuagcaguuuaa

SEQ ID NO: 2105 - RNA, 21 nt, Artificial
  Synthetic
ugcuagcaguuuauauguaua

SEQ ID NO: 2106 - RNA, 21 nt, Artificial
  Synthetic
gcuagcaguuuauauguauua

SEQ ID NO: 2107 - RNA, 21 nt, Artificial
  Synthetic
caguuuauauguauucaugaa

SEQ ID NO: 2108 - RNA, 21 nt, Artificial
  Synthetic
guauucaugaguaaugugaua

SEQ ID NO: 2109 - RNA, 21 nt, Artificial
  Synthetic
gaaugagugacuauaaggaua

SEQ ID NO: 2110 - RNA, 21 nt, Artificial
  Synthetic
gagugacuauaaggaugguua

SEQ ID NO: 2111 - RNA, 21 nt, Artificial
  Synthetic
gacuauaaggaugguuaccaa

SEQ ID NO: 2112 - RNA, 21 nt, Artificial
  Synthetic
uaaggaugguuaccauagaaa

SEQ ID NO: 2113 - RNA, 21 nt, Artificial
  Synthetic
gaugguuaccauagaaacuua

SEQ ID NO: 2114 - RNA, 21 nt, Artificial
  Synthetic
augguuaccauagaaacuuca

SEQ ID NO: 2115 - RNA, 21 nt, Artificial
  Synthetic
guuaccauagaaacuuccuua

SEQ ID NO: 2116 - RNA, 21 nt, Artificial
  Synthetic
uuaccauagaaacuuccuuua

SEQ ID NO: 2117 - RNA, 21 nt, Artificial
  Synthetic
cuacuacagagugcuaagcua

SEQ ID NO: 2118 - RNA, 21 nt, Artificial
  Synthetic
ugcuaagcugcaugugucaua

SEQ ID NO: 2119 - RNA, 21 nt, Artificial
  Synthetic
ugcaugugucaucuuacacua

SEQ ID NO: 2120 - RNA, 21 nt, Artificial
  Synthetic
uagagagaaaugguaaguuua

SEQ ID NO: 2121 - RNA, 21 nt, Artificial
  Synthetic
agagagaaaugguaaguuuca

SEQ ID NO: 2122 - RNA, 21 nt, Artificial
  Synthetic
uugaacaguauauuucaggaa

SEQ ID NO: 2123 - RNA, 21 nt, Artificial
  Synthetic
caguauauuucaggaagguua

SEQ ID NO: 2124 - RNA, 21 nt, Artificial
  Synthetic
ggaaaguugugaccaugaaua

SEQ ID NO: 2125 - RNA, 21 nt, Artificial
  Synthetic
auuuauguggauacaaauuca

SEQ ID NO: 2126 - RNA, 21 nt, Artificial
  Synthetic
uauguggauacaaauucucca

SEQ ID NO: 2127 - RNA, 21 nt, Artificial
  Synthetic
aaauucuccuuuaaaguguua

SEQ ID NO: 2128 - RNA, 21 nt, Artificial
  Synthetic
auucuccuuuaaaguguuuca

SEQ ID NO: 2129 - RNA, 21 nt, Artificial
  Synthetic
uccuuuaaaguguuucuucca

SEQ ID NO: 2130 - RNA, 21 nt, Artificial
  Synthetic
cuuuaaaguguuucuucccua

SEQ ID NO: 2131 - RNA, 21 nt, Artificial
  Synthetic
uuuaaaguguuucuucccuua

SEQ ID NO: 2132 - RNA, 21 nt, Artificial
  Synthetic
cuuacauucucccaaguuaua

SEQ ID NO: 2133 - RNA, 21 nt, Artificial
  Synthetic
auucucccaaguuauucagca

SEQ ID NO: 2134 - RNA, 21 nt, Artificial
  Synthetic
uuauucagccucauaugacua

SEQ ID NO: 2135 - RNA, 21 nt, Artificial
  Synthetic
agaacaaucuaauguguggua

SEQ ID NO: 2136 - RNA, 21 nt, Artificial
  Synthetic
aacaaucuaaugugugguuua

SEQ ID NO: 2137 - RNA, 21 nt, Artificial
  Synthetic
aaugugugguuugguauucca

SEQ ID NO: 2138 - RNA, 21 nt, Artificial
  Synthetic
augugugguuugguauuccaa

SEQ ID NO: 2139 - RNA, 21 nt, Artificial
  Synthetic
gugugguuugguauuccaaga

SEQ ID NO: 2140 - RNA, 21 nt, Artificial
  Synthetic
uggccauucgacgacagugua

SEQ ID NO: 2141 - RNA, 21 nt, Artificial
  Synthetic
gacgacagugugguguaaaga

SEQ ID NO: 2142 - RNA, 21 nt, Artificial
  Synthetic
gccauggauguauucaugaaa

SEQ ID NO: 2143 - RNA, 21 nt, Artificial
  Synthetic
auggauguauucaugaaagga

SEQ ID NO: 2144 - RNA, 21 nt, Artificial
  Synthetic
aggguguucucuauguaggca

SEQ ID NO: 2145 - RNA, 21 nt, Artificial
  Synthetic
caaagagcaagugacaaauga

SEQ ID NO: 2146 - RNA, 21 nt, Artificial
  Synthetic
agcaagugacaaauguuggaa

SEQ ID NO: 2147 - RNA, 21 nt, Artificial
  Synthetic
acaaugaggcuuaugaaauga

SEQ ID NO: 2148 - RNA, 21 nt, Artificial
  Synthetic
caguuucuugagaucugcuga

SEQ ID NO: 2149 - RNA, 21 nt, Artificial
  Synthetic
uguacaagugcucaguuccaa

SEQ ID NO: 2150 - RNA, 21 nt, Artificial
  Synthetic
caagugcucaguuccaaugua

SEQ ID NO: 2151 - RNA, 21 nt, Artificial
  Synthetic
gucaugacauuucucaaagua

SEQ ID NO: 2152 - RNA, 21 nt, Artificial
  Synthetic
ucgaagucuuccaucagcaga

SEQ ID NO: 2153 - RNA, 21 nt, Artificial
  Synthetic
cagcagugauugaaguaucua

SEQ ID NO: 2154 - RNA, 21 nt, Artificial
  Synthetic
gcuucccuuucacugaaguga

SEQ ID NO: 2155 - RNA, 21 nt, Artificial
  Synthetic
cacugaagugaauacauggua

SEQ ID NO: 2156 - RNA, 21 nt, Artificial
  Synthetic
ugaagugaauacaugguagca

SEQ ID NO: 2157 - RNA, 21 nt, Artificial
  Synthetic
cuaagugacuaccacuuauua

SEQ ID NO: 2158 - RNA, 21 nt, Artificial
  Synthetic
acuaccacuuauuucuaaaua

SEQ ID NO: 2159 - RNA, 21 nt, Artificial
  Synthetic
augugagcaugaaacuaugca

SEQ ID NO: 2160 - RNA, 21 nt, Artificial
  Synthetic
acacugccagaaguguguuua

SEQ ID NO: 2161 - RNA, 21 nt, Artificial
  Synthetic
caaauauaugaauucuaggaa

SEQ ID NO: 2162 - RNA, 21 nt, Artificial
  Synthetic
gucacuaguagaaaguauaaa

SEQ ID NO: 2163 - RNA, 21 nt, Artificial
  Synthetic
caagacagaauauucuagaca

SEQ ID NO: 2164 - RNA, 21 nt, Artificial
  Synthetic
cuagcaguuuauauguauuca

SEQ ID NO: 2165 - RNA, 21 nt, Artificial
  Synthetic
ugacuauaaggaugguuacca

SEQ ID NO: 2166 - RNA, 21 nt, Artificial
  Synthetic
gguuaccauagaaacuuccua

SEQ ID NO: 2167 - RNA, 21 nt, Artificial
  Synthetic
uaagcugcaugugucaucuua

SEQ ID NO: 2168 - RNA, 21 nt, Artificial
  Synthetic
gcugcaugugucaucuuacaa

SEQ ID NO: 2169 - RNA, 21 nt, Artificial
  Synthetic
acaguauauuucaggaaggua

SEQ ID NO: 2170 - RNA, 21 nt, Artificial
  Synthetic
ucuaccuaaagcagcauauua

SEQ ID NO: 2171 - RNA, 21 nt, Artificial
  Synthetic
uguggauacaaauucuccuua

SEQ ID NO: 2172 - RNA, 21 nt, Artificial
  Synthetic
ggauacaaauucuccuuuaaa

SEQ ID NO: 2173 - RNA, 21 nt, Artificial
  Synthetic
aauucuccuuuaaaguguuua

SEQ ID NO: 2174 - RNA, 21 nt, Artificial
  Synthetic
uucuccuuuaaaguguuucua

SEQ ID NO: 2175 - RNA, 21 nt, Artificial
  Synthetic
aaaguguuucuucccuuaaua

SEQ ID NO: 2176 - RNA, 21 nt, Artificial
  Synthetic
ugcacuuuggcacacaauuga

SEQ ID NO: 2177 - RNA, 21 nt, Artificial
  Synthetic
gaacaaucuaaugugugguua

SEQ ID NO: 2178 - RNA, 21 nt, Artificial
  Synthetic
cuaaugugugguuugguauua

SEQ ID NO: 2179 - RNA, 21 nt, Artificial
  Synthetic
uaaugugugguuugguauuca

SEQ ID NO: 2180 - DNA, 23 bp, Artificial
  Synthetic
ucuutacaccacacugucgucga

SEQ ID NO: 2181 - DNA, 23 bp, Artificial
  Synthetic
uccutuacaccacacugucgucg

SEQ ID NO: 2182 - DNA, 23 bp, Artificial
  Synthetic
utcctutacaccacacugucguc

SEQ ID NO: 2183 - DNA, 23 bp, Artificial
  Synthetic
uaugaatuccutuacaccacacu

SEQ ID NO: 2184 - RNA, 23 nt, Artificial
  Synthetic
ucuaaugaauuccuuuacaccac

SEQ ID NO: 2185 - DNA, 23 bp, Artificial
  Synthetic
utgaauacauccauggcuaauga

SEQ ID NO: 2186 - DNA, 23 bp, Artificial
  Synthetic
uaugaatacauccauggcuaaug

SEQ ID NO: 2187 - DNA, 23 bp, Artificial
  Synthetic
uccutucaugaauacauccaugg

SEQ ID NO: 2188 - DNA, 23 bp, Artificial
  Synthetic
utugaaagucctuucaugaauac

SEQ ID NO: 2189 - DNA, 23 bp, Artificial
  Synthetic
ucuutgaaaguccuuucaugaau

SEQ ID NO: 2190 - DNA, 23 bp, Artificial
  Synthetic
uccutugaaagtccuuucaugaa

SEQ ID NO: 2191 - DNA, 23 bp, Artificial
  Synthetic
ugcctutgaaaguccuuucauga

SEQ ID NO: 2192 - DNA, 23 bp, Artificial
  Synthetic
ucuacatagagaacacccucuuu

SEQ ID NO: 2193 - RNA, 23 nt, Artificial
  Synthetic
uccuacauagagaacacccucuu

SEQ ID NO: 2194 - RNA, 23 nt, Artificial
  Synthetic
uagccuacauagagaacacccuc

SEQ ID NO: 2195 - DNA, 23 bp, Artificial
  Synthetic
ucuctutgguctucucagccacu

SEQ ID NO: 2196 - DNA, 23 bp, Artificial
  Synthetic
ugcucutuggucuucucagccac

SEQ ID NO: 2197 - DNA, 23 bp, Artificial
  Synthetic
utcacutgcuctuuggucuucuc

SEQ ID NO: 2198 - DNA, 23 bp, Artificial
  Synthetic
uaacautugucacuugcucuuug

SEQ ID NO: 2199 - DNA, 23 bp, Artificial
  Synthetic
ucaacatuugucacuugcucuuu

SEQ ID NO: 2200 - DNA, 23 bp, Artificial
  Synthetic
uccaacauuugtcacuugcucuu

SEQ ID NO: 2201 - DNA, 23 bp, Artificial
  Synthetic
utccaacauuugucacuugcucu

SEQ ID NO: 2202 - RNA, 23 nt, Artificial
  Synthetic
ucauaagccucauugucaggauc

SEQ ID NO: 2203 - DNA, 23 bp, Artificial
  Synthetic
utcataagccucauugucaggau

SEQ ID NO: 2204 - DNA, 23 bp, Artificial
  Synthetic
utucauaagcctcauugucagga

SEQ ID NO: 2205 - DNA, 23 bp, Artificial
  Synthetic
ugcatutcauaagccucauuguc

SEQ ID NO: 2206 - DNA, 23 bp, Artificial
  Synthetic
uggcautucauaagccucauugu

SEQ ID NO: 2207 - DNA, 23 bp, Artificial
  Synthetic
ucagaaggcautucauaagccuc

SEQ ID NO: 2208 - RNA, 23 nt, Artificial
  Synthetic
ucucagaaggcauuucauaagcc

SEQ ID NO: 2209 - RNA, 23 nt, Artificial
  Synthetic
uccucagaaggcauuucauaagc

SEQ ID NO: 2210 - DNA, 23 bp, Artificial
  Synthetic
utucguagucutgauacccuucc

SEQ ID NO: 2211 - DNA, 23 bp, Artificial
  Synthetic
uguucgtaguctugauacccuuc

SEQ ID NO: 2212 - DNA, 23 bp, Artificial
  Synthetic
ucaggutcguagucuugauaccc

SEQ ID NO: 2213 - DNA, 23 bp, Artificial
  Synthetic
uauatutcuuaggcuucagguuc

SEQ ID NO: 2214 - DNA, 23 bp, Artificial
  Synthetic
ugauautucuuaggcuucagguu

SEQ ID NO: 2215 - DNA, 23 bp, Artificial
  Synthetic
uagatatuucutaggcuucaggu

SEQ ID NO: 2216 - DNA, 23 bp, Artificial
  Synthetic
uaagauauuuctuaggcuucagg

SEQ ID NO: 2217 - DNA, 23 bp, Artificial
  Synthetic
uaaagatauuucuuaggcuucag

SEQ ID NO: 2218 - DNA, 23 bp, Artificial
  Synthetic
ucaaagauauutcuuaggcuuca

SEQ ID NO: 2219 - DNA, 23 bp, Artificial
  Synthetic
ugcaaagauautucuuaggcuuc

SEQ ID NO: 2220 - DNA, 23 bp, Artificial
  Synthetic
uagcaaagauatuucuuaggcuu

SEQ ID NO: 2221 - RNA, 23 nt, Artificial
  Synthetic
ugagcaaagauauuucuuaggcu

SEQ ID NO: 2222 - DNA, 23 bp, Artificial
  Synthetic
ugaaactgggagcaaagauauuu

SEQ ID NO: 2223 - RNA, 23 nt, Artificial
  Synthetic
uagaaacugggagcaaagauauu

SEQ ID NO: 2224 - RNA, 23 nt, Artificial
  Synthetic
uaagaaacugggagcaaagauau

SEQ ID NO: 2225 - RNA, 23 nt, Artificial
  Synthetic
ucaagaaacugggagcaaagaua

SEQ ID NO: 2226 - DNA, 23 bp, Artificial
  Synthetic
utcaagaaacugggagcaaagau

SEQ ID NO: 2227 - DNA, 23 bp, Artificial
  Synthetic
ucucaagaaactgggagcaaaga

SEQ ID NO: 2228 - RNA, 23 nt, Artificial
  Synthetic
ucagaucucaagaaacugggagc

SEQ ID NO: 2229 - RNA, 23 nt, Artificial
  Synthetic
ucagcagaucucaagaaacuggg

SEQ ID NO: 2230 - DNA, 23 bp, Artificial
  Synthetic
ucacautggaacugagcacuugu

SEQ ID NO: 2231 - DNA, 23 bp, Artificial
  Synthetic
ugcacatuggaacugagcacuug

SEQ ID NO: 2232 - DNA, 23 bp, Artificial
  Synthetic
uagaaatgucatgacugggcaca

SEQ ID NO: 2233 - RNA, 23 nt, Artificial
  Synthetic
ugagaaaugucaugacugggcac

SEQ ID NO: 2234 - DNA, 23 bp, Artificial
  Synthetic
utgagaaaugucaugacugggca

SEQ ID NO: 2235 - DNA, 23 bp, Artificial
  Synthetic
utugagaaaugtcaugacugggc

SEQ ID NO: 2236 - DNA, 23 bp, Artificial
  Synthetic
uacutugagaaaugucaugacug

SEQ ID NO: 2237 - DNA, 23 bp, Artificial
  Synthetic
uaaacutugagaaaugucaugac

SEQ ID NO: 2238 - RNA, 23 nt, Artificial
  Synthetic
ucugcugauggaagacuucgaga

SEQ ID NO: 2239 - DNA, 23 bp, Artificial
  Synthetic
ucaatcacugctgauggaagacu

SEQ ID NO: 2240 - DNA, 23 bp, Artificial
  Synthetic
ucuucaaucactgcugauggaag

SEQ ID NO: 2241 - DNA, 23 bp, Artificial
  Synthetic
uacutcaaucacugcugauggaa

SEQ ID NO: 2242 - DNA, 23 bp, Artificial
  Synthetic
uauacutcaaucacugcugaugg

SEQ ID NO: 2243 - RNA, 23 nt, Artificial
  Synthetic
ucagauacuucaaucacugcuga

SEQ ID NO: 2244 - DNA, 23 bp, Artificial
  Synthetic
uacagatacuucaaucacugcug

SEQ ID NO: 2245 - DNA, 23 bp, Artificial
  Synthetic
ucagguacagatacuucaaucac

SEQ ID NO: 2246 - RNA, 23 nt, Artificial
  Synthetic
uagugaaagggaagcaccgaaau

SEQ ID NO: 2247 - DNA, 23 bp, Artificial
  Synthetic
ucagtgaaagggaagcaccgaaa

SEQ ID NO: 2248 - DNA, 23 bp, Artificial
  Synthetic
utcacutcagugaaagggaagca

SEQ ID NO: 2249 - DNA, 23 bp, Artificial
  Synthetic
uaugtatucactucagugaaagg

SEQ ID NO: 2250 - RNA, 23 nt, Artificial
  Synthetic
ucauguauucacuucagugaaag

SEQ ID NO: 2251 - RNA, 23 nt, Artificial
  Synthetic
uaccauguauucacuucagugaa

SEQ ID NO: 2252 - DNA, 23 bp, Artificial
  Synthetic
utaccatguautcacuucaguga

SEQ ID NO: 2253 - DNA, 23 bp, Artificial
  Synthetic
ucuaccauguatucacuucagug

SEQ ID NO: 2254 - RNA, 23 nt, Artificial
  Synthetic
uaauaagugguagucacuuaggu

SEQ ID NO: 2255 - DNA, 23 bp, Artificial
  Synthetic
uaaataaguggtagucacuuagg

SEQ ID NO: 2256 - RNA, 23 nt, Artificial
  Synthetic
ugaaauaagugguagucacuuag

SEQ ID NO: 2257 - DNA, 23 bp, Artificial
  Synthetic
uagaaataagugguagucacuua

SEQ ID NO: 2258 - DNA, 23 bp, Artificial
  Synthetic
utagaaauaagtgguagucacuu

SEQ ID NO: 2259 - DNA, 23 bp, Artificial
  Synthetic
utuagaaauaagugguagucacu

SEQ ID NO: 2260 - DNA, 23 bp, Artificial
  Synthetic
uauutagaaauaagugguaguca

SEQ ID NO: 2261 - DNA, 23 bp, Artificial
  Synthetic
ugautuagaaataagugguaguc

SEQ ID NO: 2262 - DNA, 23 bp, Artificial
  Synthetic
uaggautuagaaauaagugguag

SEQ ID NO: 2263 - DNA, 23 bp, Artificial
  Synthetic
ucaacutcugaacaacagcaaca

SEQ ID NO: 2264 - DNA, 23 bp, Artificial
  Synthetic
uacaactucugaacaacagcaac

SEQ ID NO: 2265 - RNA, 23 nt, Artificial
  Synthetic
uaacaacuucugaacaacagcaa

SEQ ID NO: 2266 - DNA, 23 bp, Artificial
  Synthetic
utaacaacuuctgaacaacagca

SEQ ID NO: 2267 - RNA, 23 nt, Artificial
  Synthetic
ucuaacaacuucugaacaacagc

SEQ ID NO: 2268 - DNA, 23 bp, Artificial
  Synthetic
uacuaacaacutcugaacaacag

SEQ ID NO: 2269 - DNA, 23 bp, Artificial
  Synthetic
ucactaacaactucugaacaaca

SEQ ID NO: 2270 - DNA, 23 bp, Artificial
  Synthetic
utcacuaacaacuucugaacaac

SEQ ID NO: 2271 - RNA, 23 nt, Artificial
  Synthetic
ucaaaucacuaacaacuucugaa

SEQ ID NO: 2272 - DNA, 23 bp, Artificial
  Synthetic
uagcaaaucactaacaacuucug

SEQ ID NO: 2273 - DNA, 23 bp, Artificial
  Synthetic
utagcaaaucacuaacaacuucu

SEQ ID NO: 2274 - RNA, 23 nt, Artificial
  Synthetic
uauagcaaaucacuaacaacuuc

SEQ ID NO: 2275 - DNA, 23 bp, Artificial
  Synthetic
ucautatucuuagacaguaucau

SEQ ID NO: 2276 - DNA, 23 bp, Artificial
  Synthetic
utcatuauucutagacaguauca

SEQ ID NO: 2277 - DNA, 23 bp, Artificial
  Synthetic
utaacaaauuucacaauacguca

SEQ ID NO: 2278 - DNA, 23 bp, Artificial
  Synthetic
ucauagtuucatgcucacauauu

SEQ ID NO: 2279 - DNA, 23 bp, Artificial
  Synthetic
utgcauaguuucaugcucacaua

SEQ ID NO: 2280 - DNA, 23 bp, Artificial
  Synthetic
uauutataggugcauaguuucau

SEQ ID NO: 2281 - DNA, 23 bp, Artificial
  Synthetic
utautuauaggtgcauaguuuca

SEQ ID NO: 2282 - DNA, 23 bp, Artificial
  Synthetic
uguatutauaggugcauaguuuc

SEQ ID NO: 2283 - DNA, 23 bp, Artificial
  Synthetic
uaguautuauaggugcauaguuu

SEQ ID NO: 2284 - DNA, 23 bp, Artificial
  Synthetic
utagtatuuauaggugcauaguu

SEQ ID NO: 2285 - DNA, 23 bp, Artificial
  Synthetic
ucautuauauacaaacacaagug

SEQ ID NO: 2286 - DNA, 23 bp, Artificial
  Synthetic
uccatutauauacaaacacaagu

SEQ ID NO: 2287 - DNA, 23 bp, Artificial
  Synthetic
uaccautuauatacaaacacaag

SEQ ID NO: 2288 - DNA, 23 bp, Artificial
  Synthetic
ucaccatuuauauacaaacacaa

SEQ ID NO: 2289 - DNA, 23 bp, Artificial
  Synthetic
utcaccauuuatauacaaacaca

SEQ ID NO: 2290 - DNA, 23 bp, Artificial
  Synthetic
utautaaagugagaugggauaaa

SEQ ID NO: 2291 - DNA, 23 bp, Artificial
  Synthetic
utuatuaaagugagaugggauaa

SEQ ID NO: 2292 - DNA, 23 bp, Artificial
  Synthetic
uauuautaaagtgagaugggaua

SEQ ID NO: 2293 - DNA, 23 bp, Artificial
  Synthetic
utautatuaaagugagaugggau

SEQ ID NO: 2294 - DNA, 23 bp, Artificial
  Synthetic
utugaatgugctaauaugugcua

SEQ ID NO: 2295 - DNA, 23 bp, Artificial
  Synthetic
uagccutgaaugugcuaauaugu

SEQ ID NO: 2296 - DNA, 23 bp, Artificial
  Synthetic
uguutaaaggcauuuccuguaaa

SEQ ID NO: 2297 - DNA, 23 bp, Artificial
  Synthetic
utgutuaaaggcauuuccuguaa

SEQ ID NO: 2298 - DNA, 23 bp, Artificial
  Synthetic
uauatutggcaacauuuaaagga

SEQ ID NO: 2299 - DNA, 23 bp, Artificial
  Synthetic
utauautuggcaacauuuaaagg

SEQ ID NO: 2300 - DNA, 23 bp, Artificial
  Synthetic
uagaautcauatauuuggcaaca

SEQ ID NO: 2301 - DNA, 23 bp, Artificial
  Synthetic
utagaatucauauauuuggcaac

SEQ ID NO: 2302 - DNA, 23 bp, Artificial
  Synthetic
ucuagaauucatauauuuggcaa

SEQ ID NO: 2303 - RNA, 23 nt, Artificial
  Synthetic
uccuagaauucauauauuuggca

SEQ ID NO: 2304 - DNA, 23 bp, Artificial
  Synthetic
utcctagaauucauauauuuggc

SEQ ID NO: 2305 - DNA, 23 bp, Artificial
  Synthetic
uauccuagaautcauauauuugg

SEQ ID NO: 2306 - DNA, 23 bp, Artificial
  Synthetic
utuaauagauctucccugaaaga

SEQ ID NO: 2307 - DNA, 23 bp, Artificial
  Synthetic
uguuaatagaucuucccugaaag

SEQ ID NO: 2308 - DNA, 23 bp, Artificial
  Synthetic
uagutaauagatcuucccugaaa

SEQ ID NO: 2309 - DNA, 23 bp, Artificial
  Synthetic
ugagtuaauagaucuucccugaa

SEQ ID NO: 2310 - RNA, 23 nt, Artificial
  Synthetic
uauuauacuuucuacuagugacu

SEQ ID NO: 2311 - DNA, 23 bp, Artificial
  Synthetic
ugaaautauactuucuacuagug

SEQ ID NO: 2312 - RNA, 23 nt, Artificial
  Synthetic
ucuagaauauucugucuugaaau

SEQ ID NO: 2313 - DNA, 23 bp, Artificial
  Synthetic
utcuagaauautcugucuugaaa

SEQ ID NO: 2314 - RNA, 23 nt, Artificial
  Synthetic
ucugcuagcaugucuagaauauu

SEQ ID NO: 2315 - RNA, 23 nt, Artificial
  Synthetic
uauaaacugcuagcaugucuaga

SEQ ID NO: 2316 - DNA, 23 bp, Artificial
  Synthetic
utauaaacugctagcaugucuag

SEQ ID NO: 2317 - DNA, 23 bp, Artificial
  Synthetic
uauataaacugcuagcaugucua

SEQ ID NO: 2318 - RNA, 23 nt, Artificial
  Synthetic
ucauauaaacugcuagcaugucu

SEQ ID NO: 2319 - DNA, 23 bp, Artificial
  Synthetic
uacatataaactgcuagcauguc

SEQ ID NO: 2320 - DNA, 23 bp, Artificial
  Synthetic
utacauauaaacugcuagcaugu

SEQ ID NO: 2321 - DNA, 23 bp, Artificial
  Synthetic
uauacatauaaacugcuagcaug

SEQ ID NO: 2322 - RNA, 23 nt, Artificial
  Synthetic
uaauacauauaaacugcuagcau

SEQ ID NO: 2323 - DNA, 23 bp, Artificial
  Synthetic
utgaauacauataaacugcuagc

SEQ ID NO: 2324 - DNA, 23 bp, Artificial
  Synthetic
uaugaatacauauaaacugcuag

SEQ ID NO: 2325 - DNA, 23 bp, Artificial
  Synthetic
ucaugaauacatauaaacugcua

SEQ ID NO: 2326 - DNA, 23 bp, Artificial
  Synthetic
uccaauauauatcacauuacuca

SEQ ID NO: 2327 - RNA, 23 nt, Artificial
  Synthetic
ucuuauagucacucauuccuccu

SEQ ID NO: 2328 - DNA, 23 bp, Artificial
  Synthetic
uccutatagucacucauuccucc

SEQ ID NO: 2329 - DNA, 23 bp, Artificial
  Synthetic
utcctuauagucacucauuccuc

SEQ ID NO: 2330 - DNA, 23 bp, Artificial
  Synthetic
uauccutauagtcacucauuccu

SEQ ID NO: 2331 - DNA, 23 bp, Artificial
  Synthetic
ucaucctuauagucacucauucc

SEQ ID NO: 2332 - DNA, 23 bp, Artificial
  Synthetic
uaaccatccuuauagucacucau

SEQ ID NO: 2333 - RNA, 23 nt, Artificial
  Synthetic
ugguaaccauccuuauagucacu

SEQ ID NO: 2334 - DNA, 23 bp, Artificial
  Synthetic
utggtaaccauccuuauagucac

SEQ ID NO: 2335 - DNA, 23 bp, Artificial
  Synthetic
uaugguaaccatccuuauaguca

SEQ ID NO: 2336 - DNA, 23 bp, Artificial
  Synthetic
uaagtutcuaugguaaccauccu

SEQ ID NO: 2337 - RNA, 23 nt, Artificial
  Synthetic
uaaggaaguuucuaugguaacca

SEQ ID NO: 2338 - DNA, 23 bp, Artificial
  Synthetic
uaaaggaaguutcuaugguaacc

SEQ ID NO: 2339 - DNA, 23 bp, Artificial
  Synthetic
ucagcutagcacucuguaguagu

SEQ ID NO: 2340 - DNA, 23 bp, Artificial
  Synthetic
ucacaugcagctuagcacucugu

SEQ ID NO: 2341 - DNA, 23 bp, Artificial
  Synthetic
uacacatgcagcuuagcacucug

SEQ ID NO: 2342 - RNA, 23 nt, Artificial
  Synthetic
uaagaugacacaugcagcuuagc

SEQ ID NO: 2343 - DNA, 23 bp, Artificial
  Synthetic
utguaagaugacacaugcagcuu

SEQ ID NO: 2344 - DNA, 23 bp, Artificial
  Synthetic
ugugtaagaugacacaugcagcu

SEQ ID NO: 2345 - RNA, 23 nt, Artificial
  Synthetic
uaguguaagaugacacaugcagc

SEQ ID NO: 2346 - DNA, 23 bp, Artificial
  Synthetic
uaaacutaccatuucucucuagu

SEQ ID NO: 2347 - RNA, 23 nt, Artificial
  Synthetic
uagaaacuuaccauuucucucua

SEQ ID NO: 2348 - RNA, 23 nt, Artificial
  Synthetic
uaagaaacuuaccauuucucucu

SEQ ID NO: 2349 - RNA, 23 nt, Artificial
  Synthetic
ucaagaaacuuaccauuucucuc

SEQ ID NO: 2350 - DNA, 23 bp, Artificial
  Synthetic
uacaagaaacutaccauuucucu

SEQ ID NO: 2351 - DNA, 23 bp, Artificial
  Synthetic
uaacaagaaactuaccauuucuc

SEQ ID NO: 2352 - RNA, 23 nt, Artificial
  Synthetic
uaaacaagaaacuuaccauuucu

SEQ ID NO: 2353 - RNA, 23 nt, Artificial
  Synthetic
ucugaaauauacuguucaauaac

SEQ ID NO: 2354 - RNA, 23 nt, Artificial
  Synthetic
uccugaaauauacuguucaauaa

SEQ ID NO: 2355 - DNA, 23 bp, Artificial
  Synthetic
uaaccutccugaaauauacuguu

SEQ ID NO: 2356 - DNA, 23 bp, Artificial
  Synthetic
uaaatatgcugcuuuagguagau

SEQ ID NO: 2357 - DNA, 23 bp, Artificial
  Synthetic
utaaautcauggucacaacuuuc

SEQ ID NO: 2358 - DNA, 23 bp, Artificial
  Synthetic
ugaatutguauccacauaaaucc

SEQ ID NO: 2359 - DNA, 23 bp, Artificial
  Synthetic
uagaautuguatccacauaaauc

SEQ ID NO: 2360 - DNA, 23 bp, Artificial
  Synthetic
ugagaatuuguauccacauaaau

SEQ ID NO: 2361 - RNA, 23 nt, Artificial
  Synthetic
uaggagaauuuguauccacauaa

SEQ ID NO: 2362 - DNA, 23 bp, Artificial
  Synthetic
utuaaaggagaauuuguauccac

SEQ ID NO: 2363 - DNA, 23 bp, Artificial
  Synthetic
ucuutaaaggagaauuuguaucc

SEQ ID NO: 2364 - DNA, 23 bp, Artificial
  Synthetic
uacutuaaaggagaauuuguauc

SEQ ID NO: 2365 - DNA, 23 bp, Artificial
  Synthetic
ucactutaaaggagaauuuguau

SEQ ID NO: 2366 - DNA, 23 bp, Artificial
  Synthetic
uacacutuaaaggagaauuugua

SEQ ID NO: 2367 - RNA, 23 nt, Artificial
  Synthetic
uaaacacuuuaaaggagaauuug

SEQ ID NO: 2368 - DNA, 23 bp, Artificial
  Synthetic
uagaaacacuutaaaggagaauu

SEQ ID NO: 2369 - DNA, 23 bp, Artificial
  Synthetic
uaagaaacacutuaaaggagaau

SEQ ID NO: 2370 - DNA, 23 bp, Artificial
  Synthetic
ugaagaaacactuuaaaggagaa

SEQ ID NO: 2371 - RNA, 23 nt, Artificial
  Synthetic
uggaagaaacacuuuaaaggaga

SEQ ID NO: 2372 - RNA, 23 nt, Artificial
  Synthetic
ugggaagaaacacuuuaaaggag

SEQ ID NO: 2373 - RNA, 23 nt, Artificial
  Synthetic
uaagggaagaaacacuuuaaagg

SEQ ID NO: 2374 - DNA, 23 bp, Artificial
  Synthetic
utautaagggaagaaacacuuua

SEQ ID NO: 2375 - DNA, 23 bp, Artificial
  Synthetic
uauatuaagggaagaaacacuuu

SEQ ID NO: 2376 - DNA, 23 bp, Artificial
  Synthetic
uaauautaagggaagaaacacuu

SEQ ID NO: 2377 - DNA, 23 bp, Artificial
  Synthetic
utaaauauuaagggaagaaacac

SEQ ID NO: 2378 - RNA, 23 nt, Artificial
  Synthetic
ugauaaauauuaagggaagaaac

SEQ ID NO: 2379 - DNA, 23 bp, Artificial
  Synthetic
ucagauaaauatuaagggaagaa

SEQ ID NO: 2380 - DNA, 23 bp, Artificial
  Synthetic
uauaactugggagaauguaaguc

SEQ ID NO: 2381 - RNA, 23 nt, Artificial
  Synthetic
uaauaacuugggagaauguaagu

SEQ ID NO: 2382 - DNA, 23 bp, Artificial
  Synthetic
ugaataacuugggagaauguaag

SEQ ID NO: 2383 - DNA, 23 bp, Artificial
  Synthetic
utgaauaacuugggagaauguaa

SEQ ID NO: 2384 - DNA, 23 bp, Artificial
  Synthetic
ucugaataacutgggagaaugua

SEQ ID NO: 2385 - DNA, 23 bp, Artificial
  Synthetic
ugcugaauaactugggagaaugu

SEQ ID NO: 2386 - DNA, 23 bp, Artificial
  Synthetic
ucauaugaggctgaauaacuugg

SEQ ID NO: 2387 - DNA, 23 bp, Artificial
  Synthetic
utcatatgaggcugaauaacuug

SEQ ID NO: 2388 - RNA, 23 nt, Artificial
  Synthetic
ugucauaugaggcugaauaacuu

SEQ ID NO: 2389 - DNA, 23 bp, Artificial
  Synthetic
ucaaagtgcactcugaacuguuu

SEQ ID NO: 2390 - RNA, 23 nt, Artificial
  Synthetic
uccaaagugcacucugaacuguu

SEQ ID NO: 2391 - DNA, 23 bp, Artificial
  Synthetic
utgccaaagugcacucugaacug

SEQ ID NO: 2392 - DNA, 23 bp, Artificial
  Synthetic
ucaatugugugccaaagugcacu

SEQ ID NO: 2393 - DNA, 23 bp, Artificial
  Synthetic
uacacatuagatuguucuguucc

SEQ ID NO: 2394 - RNA, 23 nt, Artificial
  Synthetic
ucacacauuagauuguucuguuc

SEQ ID NO: 2395 - RNA, 23 nt, Artificial
  Synthetic
uccacacauuagauuguucuguu

SEQ ID NO: 2396 - RNA, 23 nt, Artificial
  Synthetic
uaccacacauuagauuguucugu

SEQ ID NO: 2397 - RNA, 23 nt, Artificial
  Synthetic
ucaaaccacacauuagauuguuc

SEQ ID NO: 2398 - RNA, 23 nt, Artificial
  Synthetic
uccaaaccacacauuagauuguu

SEQ ID NO: 2399 - RNA, 23 nt, Artificial
  Synthetic
uaccaaaccacacauuagauugu

SEQ ID NO: 2400 - DNA, 23 bp, Artificial
  Synthetic
utaccaaaccacacauuagauug

SEQ ID NO: 2401 - RNA, 23 nt, Artificial
  Synthetic
uauaccaaaccacacauuagauu

SEQ ID NO: 2402 - DNA, 23 bp, Artificial
  Synthetic
ugaataccaaaccacacauuaga

SEQ ID NO: 2403 - RNA, 23 nt, Artificial
  Synthetic
uggaauaccaaaccacacauuag

SEQ ID NO: 2404 - DNA, 23 bp, Artificial
  Synthetic
utggaataccaaaccacacauua

SEQ ID NO: 2405 - RNA, 23 nt, Artificial
  Synthetic
ucuuggaauaccaaaccacacau

SEQ ID NO: 2406 - DNA, 23 bp, Artificial
  Synthetic
uugaautccuuuacaccacacug

SEQ ID NO: 2407 - RNA, 23 nt, Artificial
  Synthetic
uaaugaauuccuuuacaccacac

SEQ ID NO: 2408 - DNA, 23 bp, Artificial
  Synthetic
uucatgaauacauccauggcuaa

SEQ ID NO: 2409 - DNA, 23 bp, Artificial
  Synthetic
uucctutcaugaauacauccaug

SEQ ID NO: 2410 - RNA, 23 nt, Artificial
  Synthetic
uuugaaaguccuuucaugaauac

SEQ ID NO: 2411 - DNA, 23 bp, Artificial
  Synthetic
ugcctutgaaaguccuuucauga

SEQ ID NO: 2412 - DNA, 23 bp, Artificial
  Synthetic
uggccutugaaaguccuuucaug

SEQ ID NO: 2413 - RNA, 23 nt, Artificial
  Synthetic
uagccuacauagagaacacccuc

SEQ ID NO: 2414 - DNA, 23 bp, Artificial
  Synthetic
ugcucutuggucuucucagccac

SEQ ID NO: 2415 - DNA, 23 bp, Artificial
  Synthetic
uucacutgcucuuuggucuucuc

SEQ ID NO: 2416 - DNA, 23 bp, Artificial
  Synthetic
uucataagccucauugucaggau

SEQ ID NO: 2417 - DNA, 23 bp, Artificial
  Synthetic
ugcatutcauaagccucauuguc

SEQ ID NO: 2418 - DNA, 23 bp, Artificial
  Synthetic
uggcautucauaagccucauugu

SEQ ID NO: 2419 - DNA, 23 bp, Artificial
  Synthetic
ucuucctcagaaggcauuucaua

SEQ ID NO: 2420 - RNA, 23 nt, Artificial
  Synthetic
uuucguagucuugauacccuucc

SEQ ID NO: 2421 - DNA, 23 bp, Artificial
  Synthetic
uguucgtagucuugauacccuuc

SEQ ID NO: 2422 - DNA, 23 bp, Artificial
  Synthetic
uauatutcuuaggcuucagguuc

SEQ ID NO: 2423 - DNA, 23 bp, Artificial
  Synthetic
uagatatuucuuaggcuucaggu

SEQ ID NO: 2424 - DNA, 23 bp, Artificial
  Synthetic
uaaagatauuucuuaggcuucag

SEQ ID NO: 2425 - RNA, 23 nt, Artificial
  Synthetic
uggagcaaagauauuucuuaggc

SEQ ID NO: 2426 - DNA, 23 bp, Artificial
  Synthetic
ugaaactgggagcaaagauauuu

SEQ ID NO: 2427 - RNA, 23 nt, Artificial
  Synthetic
uucucaagaaacugggagcaaag

SEQ ID NO: 2428 - DNA, 23 bp, Artificial
  Synthetic
uauctcaagaaacugggagcaaa

SEQ ID NO: 2429 - DNA, 23 bp, Artificial
  Synthetic
uggaactgagcacuuguacagga

SEQ ID NO: 2430 - RNA, 23 nt, Artificial
  Synthetic
uuuggaacugagcacuuguacag

SEQ ID NO: 2431 - RNA, 23 nt, Artificial
  Synthetic
uuugagaaaugucaugacugggc

SEQ ID NO: 2432 - DNA, 23 bp, Artificial
  Synthetic
ucaatcacugcugauggaagacu

SEQ ID NO: 2433 - DNA, 23 bp, Artificial
  Synthetic
uuucaatcacugcugauggaaga

SEQ ID NO: 2434 - DNA, 23 bp, Artificial
  Synthetic
uacutcaaucacugcugauggaa

SEQ ID NO: 2435 - DNA, 23 bp, Artificial
  Synthetic
uauacutcaaucacugcugaugg

SEQ ID NO: 2436 - DNA, 23 bp, Artificial
  Synthetic
uacagatacuucaaucacugcug

SEQ ID NO: 2437 - DNA, 23 bp, Artificial
  Synthetic
uucacutcagugaaagggaagca

SEQ ID NO: 2438 - RNA, 23 nt, Artificial
  Synthetic
ucauguauucacuucagugaaag

SEQ ID NO: 2439 - DNA, 23 bp, Artificial
  Synthetic
uccatgtauucacuucagugaaa

SEQ ID NO: 2440 - DNA, 23 bp, Artificial
  Synthetic
uuaccatguauucacuucaguga

SEQ ID NO: 2441 - DNA, 23 bp, Artificial
  Synthetic
ugautuagaaauaagugguaguc

SEQ ID NO: 2442 - DNA, 23 bp, Artificial
  Synthetic
uggatutagaaauaagugguagu

SEQ ID NO: 2443 - DNA, 23 bp, Artificial
  Synthetic
ugaggatuuagaaauaaguggua

SEQ ID NO: 2444 - RNA, 23 nt, Artificial
  Synthetic
uauagcaaaucacuaacaacuuc

SEQ ID NO: 2445 - DNA, 23 bp, Artificial
  Synthetic
uucatuauucuuagacaguauca

SEQ ID NO: 2446 - DNA, 23 bp, Artificial
  Synthetic
uauagutucaugcucacauauuu

SEQ ID NO: 2447 - DNA, 23 bp, Artificial
  Synthetic
ucauagtuucaugcucacauauu

SEQ ID NO: 2448 - RNA, 23 nt, Artificial
  Synthetic
uugcauaguuucaugcucacaua

SEQ ID NO: 2449 - DNA, 23 bp, Artificial
  Synthetic
uguatutauaggugcauaguuuc

SEQ ID NO: 2450 - DNA, 23 bp, Artificial
  Synthetic
uuagtatuuauaggugcauaguu

SEQ ID NO: 2451 - RNA, 23 nt, Artificial
  Synthetic
uucaccauuuauauacaaacaca

SEQ ID NO: 2452 - DNA, 23 bp, Artificial
  Synthetic
uuautatuaaagugagaugggau

SEQ ID NO: 2453 - DNA, 23 bp, Artificial
  Synthetic
uagccutgaaugugcuaauaugu

SEQ ID NO: 2454 - DNA, 23 bp, Artificial
  Synthetic
uauatutggcaacauuuaaagga

SEQ ID NO: 2455 - RNA, 23 nt, Artificial
  Synthetic
uauccuagaauucauauauuugg

SEQ ID NO: 2456 - RNA, 23 nt, Artificial
  Synthetic
uaauagaucuucccugaaagaga

SEQ ID NO: 2457 - RNA, 23 nt, Artificial
  Synthetic
ucuagcaugucuagaauauucug

SEQ ID NO: 2458 - RNA, 23 nt, Artificial
  Synthetic
ucugcuagcaugucuagaauauu

SEQ ID NO: 2459 - DNA, 23 bp, Artificial
  Synthetic
uuaaactgcuagcaugucuagaa

SEQ ID NO: 2460 - DNA, 23 bp, Artificial
  Synthetic
uauacatauaaacugcuagcaug

SEQ ID NO: 2461 - RNA, 23 nt, Artificial
  Synthetic
uaauacauauaaacugcuagcau

SEQ ID NO: 2462 - DNA, 23 bp, Artificial
  Synthetic
uucatgaauacauauaaacugcu

SEQ ID NO: 2463 - RNA, 23 nt, Artificial
  Synthetic
uaucacauuacucaugaauacau

SEQ ID NO: 2464 - DNA, 23 bp, Artificial
  Synthetic
uauccutauagucacucauuccu

SEQ ID NO: 2465 - DNA, 23 bp, Artificial
  Synthetic
uaaccatccuuauagucacucau

SEQ ID NO: 2466 - DNA, 23 bp, Artificial
  Synthetic
uuggtaaccauccuuauagucac

SEQ ID NO: 2467 - DNA, 23 bp, Artificial
  Synthetic
uuuctatgguaaccauccuuaua

SEQ ID NO: 2468 - DNA, 23 bp, Artificial
  Synthetic
uaagtutcuaugguaaccauccu

SEQ ID NO: 2469 - DNA, 23 bp, Artificial
  Synthetic
ugaagutucuaugguaaccaucc

SEQ ID NO: 2470 - RNA, 23 nt, Artificial
  Synthetic
uaaggaaguuucuaugguaacca

SEQ ID NO: 2471 - RNA, 23 nt, Artificial
  Synthetic
uaaaggaaguuucuaugguaacc

SEQ ID NO: 2472 - DNA, 23 bp, Artificial
  Synthetic
uagctuagcacucuguaguaguc

SEQ ID NO: 2473 - RNA, 23 nt, Artificial
  Synthetic
uaugacacaugcagcuuagcacu

SEQ ID NO: 2474 - RNA, 23 nt, Artificial
  Synthetic
uaguguaagaugacacaugcagc

SEQ ID NO: 2475 - DNA, 23 bp, Artificial
  Synthetic
uaaacutaccauuucucucuagu

SEQ ID NO: 2476 - DNA, 23 bp, Artificial
  Synthetic
ugaaactuaccauuucucucuag

SEQ ID NO: 2477 - DNA, 23 bp, Artificial
  Synthetic
uucctgaaauauacuguucaaua

SEQ ID NO: 2478 - DNA, 23 bp, Artificial
  Synthetic
uaaccutccugaaauauacuguu

SEQ ID NO: 2479 - DNA, 23 bp, Artificial
  Synthetic
uauucatggucacaacuuuccua

SEQ ID NO: 2480 - DNA, 23 bp, Artificial
  Synthetic
ugaatutguauccacauaaaucc

SEQ ID NO: 2481 - RNA, 23 nt, Artificial
  Synthetic
uggagaauuuguauccacauaaa

SEQ ID NO: 2482 - DNA, 23 bp, Artificial
  Synthetic
uaacactuuaaaggagaauuugu

SEQ ID NO: 2483 - RNA, 23 nt, Artificial
  Synthetic
ugaaacacuuuaaaggagaauuu

SEQ ID NO: 2484 - RNA, 23 nt, Artificial
  Synthetic
uggaagaaacacuuuaaaggaga

SEQ ID NO: 2485 - RNA, 23 nt, Artificial
  Synthetic
uagggaagaaacacuuuaaagga

SEQ ID NO: 2486 - RNA, 23 nt, Artificial
  Synthetic
uaagggaagaaacacuuuaaagg

SEQ ID NO: 2487 - DNA, 23 bp, Artificial
  Synthetic
uauaactugggagaauguaaguc

SEQ ID NO: 2488 - RNA, 23 nt, Artificial
  Synthetic
ugcugaauaacuugggagaaugu

SEQ ID NO: 2489 - DNA, 23 bp, Artificial
  Synthetic
uagucataugaggcugaauaacu

SEQ ID NO: 2490 - RNA, 23 nt, Artificial
  Synthetic
uaccacacauuagauuguucugu

SEQ ID NO: 2491 - RNA, 23 nt, Artificial
  Synthetic
uaaaccacacauuagauuguucu

SEQ ID NO: 2492 - RNA, 23 nt, Artificial
  Synthetic
uggaauaccaaaccacacauuag

SEQ ID NO: 2493 - DNA, 23 bp, Artificial
  Synthetic
uuggaataccaaaccacacauua

SEQ ID NO: 2494 - RNA, 23 nt, Artificial
  Synthetic
ucuuggaauaccaaaccacacau

SEQ ID NO: 2495 - RNA, 23 nt, Artificial
  Synthetic
uacacugucgucgaauggccacu

SEQ ID NO: 2496 - DNA, 23 bp, Artificial
  Synthetic
ucuutacaccacacugucgucga

SEQ ID NO: 2497 - RNA, 23 nt, Artificial
  Synthetic
uuucaugaauacauccauggcua

SEQ ID NO: 2498 - DNA, 23 bp, Artificial
  Synthetic
uccutucaugaauacauccaugg

SEQ ID NO: 2499 - DNA, 23 bp, Artificial
  Synthetic
ugcctacauagagaacacccucu

SEQ ID NO: 2500 - DNA, 23 bp, Artificial
  Synthetic
ucautugucacuugcucuuuggu

SEQ ID NO: 2501 - RNA, 23 nt, Artificial
  Synthetic
uuccaacauuugucacuugcucu

SEQ ID NO: 2502 - DNA, 23 bp, Artificial
  Synthetic
ucautucauaagccucauuguca

SEQ ID NO: 2503 - RNA, 23 nt, Artificial
  Synthetic
ucagcagaucucaagaaacuggg

SEQ ID NO: 2504 - RNA, 23 nt, Artificial
  Synthetic
uuggaacugagcacuuguacagg

SEQ ID NO: 2505 - DNA, 23 bp, Artificial
  Synthetic
uacatuggaacugagcacuugua

SEQ ID NO: 2506 - DNA, 23 bp, Artificial
  Synthetic
uacutugagaaaugucaugacug

SEQ ID NO: 2507 - RNA, 23 nt, Artificial
  Synthetic
ucugcugauggaagacuucgaga

SEQ ID NO: 2508 - DNA, 23 bp, Artificial
  Synthetic
uagatacuucaaucacugcugau

SEQ ID NO: 2509 - DNA, 23 bp, Artificial
  Synthetic
ucactucagugaaagggaagcac

SEQ ID NO: 2510 - RNA, 23 nt, Artificial
  Synthetic
uaccauguauucacuucagugaa

SEQ ID NO: 2511 - RNA, 23 nt, Artificial
  Synthetic
ugcuaccauguauucacuucagu

SEQ ID NO: 2512 - RNA, 23 nt, Artificial
  Synthetic
uaauaagugguagucacuuaggu

SEQ ID NO: 2513 - DNA, 23 bp, Artificial
  Synthetic
uauutagaaauaagugguaguca

SEQ ID NO: 2514 - DNA, 23 bp, Artificial
  Synthetic
ugcataguuucaugcucacauau

SEQ ID NO: 2515 - RNA, 23 nt, Artificial
  Synthetic
uaaacacacuucuggcaguguug

SEQ ID NO: 2516 - DNA, 23 bp, Artificial
  Synthetic
uucctagaauucauauauuuggc

SEQ ID NO: 2517 - DNA, 23 bp, Artificial
  Synthetic
uuuatacuuucuacuagugacuu

SEQ ID NO: 2518 - DNA, 23 bp, Artificial
  Synthetic
uguctagaauauucugucuugaa

SEQ ID NO: 2519 - DNA, 23 bp, Artificial
  Synthetic
ugaatacauauaaacugcuagca

SEQ ID NO: 2520 - RNA, 23 nt, Artificial
  Synthetic
ugguaaccauccuuauagucacu

SEQ ID NO: 2521 - RNA, 23 nt, Artificial
  Synthetic
uaggaaguuucuaugguaaccau

SEQ ID NO: 2522 - RNA, 23 nt, Artificial
  Synthetic
uaagaugacacaugcagcuuagc

SEQ ID NO: 2523 - RNA, 23 nt, Artificial
  Synthetic
uuguaagaugacacaugcagcuu

SEQ ID NO: 2524 - DNA, 23 bp, Artificial
  Synthetic
uacctuccugaaauauacuguuc

SEQ ID NO: 2525 - RNA, 23 nt, Artificial
  Synthetic
uaauaugcugcuuuagguagauu

SEQ ID NO: 2526 - RNA, 23 nt, Artificial
  Synthetic
uaaggagaauuuguauccacaua

SEQ ID NO: 2527 - RNA, 23 nt, Artificial
  Synthetic
uuuaaaggagaauuuguauccac

SEQ ID NO: 2528 - RNA, 23 nt, Artificial
  Synthetic
uaaacacuuuaaaggagaauuug

SEQ ID NO: 2529 - RNA, 23 nt, Artificial
  Synthetic
uagaaacacuuuaaaggagaauu

SEQ ID NO: 2530 - RNA, 23 nt, Artificial
  Synthetic
uauuaagggaagaaacacuuuaa

SEQ ID NO: 2531 - DNA, 23 bp, Artificial
  Synthetic
ucaatugugugccaaagugcacu

SEQ ID NO: 2532 - RNA, 23 nt, Artificial
  Synthetic
uaaccacacauuagauuguucug

SEQ ID NO: 2533 - RNA, 23 nt, Artificial
  Synthetic
uaauaccaaaccacacauuagau

SEQ ID NO: 2534 - DNA, 23 bp, Artificial
  Synthetic
ugaataccaaaccacacauuaga

SEQ ID NO: 2535 - RNA, 23 nt, Artificial
  Synthetic
ucgacgacagugugguguaaagg

SEQ ID NO: 2536 - RNA, 23 nt, Artificial
  Synthetic
cgacgacagugugguguaaagga

SEQ ID NO: 2537 - RNA, 23 nt, Artificial
  Synthetic
gacgacagugugguguaaaggaa

SEQ ID NO: 2538 - RNA, 23 nt, Artificial
  Synthetic
agugugguguaaaggaauucauu

SEQ ID NO: 2539 - RNA, 23 nt, Artificial
  Synthetic
gugguguaaaggaauucauuagc

SEQ ID NO: 2540 - RNA, 23 nt, Artificial
  Synthetic
ucauuagccauggauguauucau

SEQ ID NO: 2541 - RNA, 23 nt, Artificial
  Synthetic
cauuagccauggauguauucaug

SEQ ID NO: 2542 - RNA, 23 nt, Artificial
  Synthetic
ccauggauguauucaugaaagga

SEQ ID NO: 2543 - RNA, 23 nt, Artificial
  Synthetic
guauucaugaaaggacuuucaaa

SEQ ID NO: 2544 - RNA, 23 nt, Artificial
  Synthetic
auucaugaaaggacuuucaaagg

SEQ ID NO: 2545 - RNA, 23 nt, Artificial
  Synthetic
uucaugaaaggacuuucaaaggc

SEQ ID NO: 2546 - RNA, 23 nt, Artificial
  Synthetic
ucaugaaaggacuuucaaaggcc

SEQ ID NO: 2547 - RNA, 23 nt, Artificial
  Synthetic
aaagaggguguucucuauguagg

SEQ ID NO: 2548 - RNA, 23 nt, Artificial
  Synthetic
aagaggguguucucuauguaggc

SEQ ID NO: 2549 - RNA, 23 nt, Artificial
  Synthetic
gaggguguucucuauguaggcuc

SEQ ID NO: 2550 - RNA, 23 nt, Artificial
  Synthetic
aguggcugagaagaccaaagagc

SEQ ID NO: 2551 - RNA, 23 nt, Artificial
  Synthetic
guggcugagaagaccaaagagca

SEQ ID NO: 2552 - RNA, 23 nt, Artificial
  Synthetic
gagaagaccaaagagcaagugac

SEQ ID NO: 2553 - RNA, 23 nt, Artificial
  Synthetic
caaagagcaagugacaaauguug

SEQ ID NO: 2554 - RNA, 23 nt, Artificial
  Synthetic
aaagagcaagugacaaauguugg

SEQ ID NO: 2555 - RNA, 23 nt, Artificial
  Synthetic
aagagcaagugacaaauguugga

SEQ ID NO: 2556 - RNA, 23 nt, Artificial
  Synthetic
agagcaagugacaaauguuggag

SEQ ID NO: 2557 - RNA, 23 nt, Artificial
  Synthetic
gauccugacaaugaggcuuauga

SEQ ID NO: 2558 - RNA, 23 nt, Artificial
  Synthetic
auccugacaaugaggcuuaugaa

SEQ ID NO: 2559 - RNA, 23 nt, Artificial
  Synthetic
uccugacaaugaggcuuaugaaa

SEQ ID NO: 2560 - RNA, 23 nt, Artificial
  Synthetic
gacaaugaggcuuaugaaaugcc

SEQ ID NO: 2561 - RNA, 23 nt, Artificial
  Synthetic
acaaugaggcuuaugaaaugccu

SEQ ID NO: 2562 - RNA, 23 nt, Artificial
  Synthetic
gaggcuuaugaaaugccuucuga

SEQ ID NO: 2563 - RNA, 23 nt, Artificial
  Synthetic
ggcuuaugaaaugccuucugagg

SEQ ID NO: 2564 - RNA, 23 nt, Artificial
  Synthetic
gcuuaugaaaugccuucugagga

SEQ ID NO: 2565 - RNA, 23 nt, Artificial
  Synthetic
ggaaggguaucaagacuacgaac

SEQ ID NO: 2566 - RNA, 23 nt, Artificial
  Synthetic
gaaggguaucaagacuacgaacc

SEQ ID NO: 2567 - RNA, 23 nt, Artificial
  Synthetic
ggguaucaagacuacgaaccuga

SEQ ID NO: 2568 - RNA, 23 nt, Artificial
  Synthetic
gaaccugaagccuaagaaauauc

SEQ ID NO: 2569 - RNA, 23 nt, Artificial
  Synthetic
aaccugaagccuaagaaauaucu

SEQ ID NO: 2570 - RNA, 23 nt, Artificial
  Synthetic
accugaagccuaagaaauaucuu

SEQ ID NO: 2571 - RNA, 23 nt, Artificial
  Synthetic
ccugaagccuaagaaauaucuuu

SEQ ID NO: 2572 - RNA, 23 nt, Artificial
  Synthetic
cugaagccuaagaaauaucuuug

SEQ ID NO: 2573 - RNA, 23 nt, Artificial
  Synthetic
ugaagccuaagaaauaucuuugc

SEQ ID NO: 2574 - RNA, 23 nt, Artificial
  Synthetic
gaagccuaagaaauaucuuugcu

SEQ ID NO: 2575 - RNA, 23 nt, Artificial
  Synthetic
aagccuaagaaauaucuuugcuc

SEQ ID NO: 2576 - RNA, 23 nt, Artificial
  Synthetic
agccuaagaaauaucuuugcucc

SEQ ID NO: 2577 - RNA, 23 nt, Artificial
  Synthetic
aaauaucuuugcucccaguuucu

SEQ ID NO: 2578 - RNA, 23 nt, Artificial
  Synthetic
aauaucuuugcucccaguuucuu

SEQ ID NO: 2579 - RNA, 23 nt, Artificial
  Synthetic
auaucuuugcucccaguuucuug

SEQ ID NO: 2580 - RNA, 23 nt, Artificial
  Synthetic
uaucuuugcucccaguuucuuga

SEQ ID NO: 2581 - RNA, 23 nt, Artificial
  Synthetic
aucuuugcucccaguuucuugag

SEQ ID NO: 2582 - RNA, 23 nt, Artificial
  Synthetic
ucuuugcucccaguuucuugaga

SEQ ID NO: 2583 - RNA, 23 nt, Artificial
  Synthetic
gcucccaguuucuugagaucugc

SEQ ID NO: 2584 - RNA, 23 nt, Artificial
  Synthetic
cccaguuucuugagaucugcuga

SEQ ID NO: 2585 - RNA, 23 nt, Artificial
  Synthetic
acaagugcucaguuccaaugugc

SEQ ID NO: 2586 - RNA, 23 nt, Artificial
  Synthetic
caagugcucaguuccaaugugcc

SEQ ID NO: 2587 - RNA, 23 nt, Artificial
  Synthetic
ugugcccagucaugacauuucuc

SEQ ID NO: 2588 - RNA, 23 nt, Artificial
  Synthetic
gugcccagucaugacauuucuca

SEQ ID NO: 2589 - RNA, 23 nt, Artificial
  Synthetic
ugcccagucaugacauuucucaa

SEQ ID NO: 2590 - RNA, 23 nt, Artificial
  Synthetic
gcccagucaugacauuucucaaa

SEQ ID NO: 2591 - RNA, 23 nt, Artificial
  Synthetic
cagucaugacauuucucaaaguu

SEQ ID NO: 2592 - RNA, 23 nt, Artificial
  Synthetic
gucaugacauuucucaaaguuuu

SEQ ID NO: 2593 - RNA, 23 nt, Artificial
  Synthetic
ucucgaagucuuccaucagcagu

SEQ ID NO: 2594 - RNA, 23 nt, Artificial
  Synthetic
agucuuccaucagcagugauuga

SEQ ID NO: 2595 - RNA, 23 nt, Artificial
  Synthetic
cuuccaucagcagugauugaagu

SEQ ID NO: 2596 - RNA, 23 nt, Artificial
  Synthetic
uuccaucagcagugauugaagua

SEQ ID NO: 2597 - RNA, 23 nt, Artificial
  Synthetic
ccaucagcagugauugaaguauc

SEQ ID NO: 2598 - RNA, 23 nt, Artificial
  Synthetic
ucagcagugauugaaguaucugu

SEQ ID NO: 2599 - RNA, 23 nt, Artificial
  Synthetic
cagcagugauugaaguaucugua

SEQ ID NO: 2600 - RNA, 23 nt, Artificial
  Synthetic
gugauugaaguaucuguaccugc

SEQ ID NO: 2601 - RNA, 23 nt, Artificial
  Synthetic
auuucggugcuucccuuucacug

SEQ ID NO: 2602 - RNA, 23 nt, Artificial
  Synthetic
uuucggugcuucccuuucacuga

SEQ ID NO: 2603 - RNA, 23 nt, Artificial
  Synthetic
ugcuucccuuucacugaagugaa

SEQ ID NO: 2604 - RNA, 23 nt, Artificial
  Synthetic
ccuuucacugaagugaauacaug

SEQ ID NO: 2605 - RNA, 23 nt, Artificial
  Synthetic
cuuucacugaagugaauacaugg

SEQ ID NO: 2606 - RNA, 23 nt, Artificial
  Synthetic
uucacugaagugaauacauggua

SEQ ID NO: 2607 - RNA, 23 nt, Artificial
  Synthetic
ucacugaagugaauacaugguag

SEQ ID NO: 2608 - RNA, 23 nt, Artificial
  Synthetic
cacugaagugaauacaugguagc

SEQ ID NO: 2609 - RNA, 23 nt, Artificial
  Synthetic
accuaagugacuaccacuuauuu

SEQ ID NO: 2610 - RNA, 23 nt, Artificial
  Synthetic
ccuaagugacuaccacuuauuuc

SEQ ID NO: 2611 - RNA, 23 nt, Artificial
  Synthetic
cuaagugacuaccacuuauuucu

SEQ ID NO: 2612 - RNA, 23 nt, Artificial
  Synthetic
uaagugacuaccacuuauuucua

SEQ ID NO: 2613 - RNA, 23 nt, Artificial
  Synthetic
aagugacuaccacuuauuucuaa

SEQ ID NO: 2614 - RNA, 23 nt, Artificial
  Synthetic
agugacuaccacuuauuucuaaa

SEQ ID NO: 2615 - RNA, 23 nt, Artificial
  Synthetic
ugacuaccacuuauuucuaaauc

SEQ ID NO: 2616 - RNA, 23 nt, Artificial
  Synthetic
gacuaccacuuauuucuaaaucc

SEQ ID NO: 2617 - RNA, 23 nt, Artificial
  Synthetic
cuaccacuuauuucuaaauccuc

SEQ ID NO: 2618 - RNA, 23 nt, Artificial
  Synthetic
uguugcuguuguucagaaguugu

SEQ ID NO: 2619 - RNA, 23 nt, Artificial
  Synthetic
guugcuguuguucagaaguuguu

SEQ ID NO: 2620 - RNA, 23 nt, Artificial
  Synthetic
uugcuguuguucagaaguuguua

SEQ ID NO: 2621 - RNA, 23 nt, Artificial
  Synthetic
ugcuguuguucagaaguuguuag

SEQ ID NO: 2622 - RNA, 23 nt, Artificial
  Synthetic
gcuguuguucagaaguuguuagu

SEQ ID NO: 2623 - RNA, 23 nt, Artificial
  Synthetic
cuguuguucagaaguuguuagug

SEQ ID NO: 2624 - RNA, 23 nt, Artificial
  Synthetic
uguuguucagaaguuguuaguga

SEQ ID NO: 2625 - RNA, 23 nt, Artificial
  Synthetic
guuguucagaaguuguuagugau

SEQ ID NO: 2626 - RNA, 23 nt, Artificial
  Synthetic
uucagaaguuguuagugauuugc

SEQ ID NO: 2627 - RNA, 23 nt, Artificial
  Synthetic
cagaaguuguuagugauuugcua

SEQ ID NO: 2628 - RNA, 23 nt, Artificial
  Synthetic
agaaguuguuagugauuugcuau

SEQ ID NO: 2629 - RNA, 23 nt, Artificial
  Synthetic
gaaguuguuagugauuugcuauc

SEQ ID NO: 2630 - RNA, 23 nt, Artificial
  Synthetic
augauacugucuaagaauaauga

SEQ ID NO: 2631 - RNA, 23 nt, Artificial
  Synthetic
ugauacugucuaagaauaaugac

SEQ ID NO: 2632 - RNA, 23 nt, Artificial
  Synthetic
ugacguauugugaaauuuguuaa

SEQ ID NO: 2633 - RNA, 23 nt, Artificial
  Synthetic
aauaugugagcaugaaacuaugc

SEQ ID NO: 2634 - RNA, 23 nt, Artificial
  Synthetic
uaugugagcaugaaacuaugcac

SEQ ID NO: 2635 - RNA, 23 nt, Artificial
  Synthetic
augaaacuaugcaccuauaaaua

SEQ ID NO: 2636 - RNA, 23 nt, Artificial
  Synthetic
ugaaacuaugcaccuauaaauac

SEQ ID NO: 2637 - RNA, 23 nt, Artificial
  Synthetic
gaaacuaugcaccuauaaauacu

SEQ ID NO: 2638 - RNA, 23 nt, Artificial
  Synthetic
aaacuaugcaccuauaaauacua

SEQ ID NO: 2639 - RNA, 23 nt, Artificial
  Synthetic
aacuaugcaccuauaaauacuaa

SEQ ID NO: 2640 - RNA, 23 nt, Artificial
  Synthetic
cacuuguguuuguauauaaaugg

SEQ ID NO: 2641 - RNA, 23 nt, Artificial
  Synthetic
acuuguguuuguauauaaauggu

SEQ ID NO: 2642 - RNA, 23 nt, Artificial
  Synthetic
cuuguguuuguauauaaauggug

SEQ ID NO: 2643 - RNA, 23 nt, Artificial
  Synthetic
uuguguuuguauauaaaugguga

SEQ ID NO: 2644 - RNA, 23 nt, Artificial
  Synthetic
uguguuuguauauaaauggugag

SEQ ID NO: 2645 - RNA, 23 nt, Artificial
  Synthetic
uuuaucccaucucacuuuaauaa

SEQ ID NO: 2646 - RNA, 23 nt, Artificial
  Synthetic
uuaucccaucucacuuuaauaau

SEQ ID NO: 2647 - RNA, 23 nt, Artificial
  Synthetic
uaucccaucucacuuuaauaaua

SEQ ID NO: 2648 - RNA, 23 nt, Artificial
  Synthetic
aucccaucucacuuuaauaauaa

SEQ ID NO: 2649 - RNA, 23 nt, Artificial
  Synthetic
uagcacauauuagcacauucaag

SEQ ID NO: 2650 - RNA, 23 nt, Artificial
  Synthetic
acauauuagcacauucaaggcuc

SEQ ID NO: 2651 - RNA, 23 nt, Artificial
  Synthetic
uuuacaggaaaugccuuuaaaca

SEQ ID NO: 2652 - RNA, 23 nt, Artificial
  Synthetic
uuacaggaaaugccuuuaaacau

SEQ ID NO: 2653 - RNA, 23 nt, Artificial
  Synthetic
uccuuuaaauguugccaaauaua

SEQ ID NO: 2654 - RNA, 23 nt, Artificial
  Synthetic
ccuuuaaauguugccaaauauau

SEQ ID NO: 2655 - RNA, 23 nt, Artificial
  Synthetic
uguugccaaauauaugaauucua

SEQ ID NO: 2656 - RNA, 23 nt, Artificial
  Synthetic
guugccaaauauaugaauucuag

SEQ ID NO: 2657 - RNA, 23 nt, Artificial
  Synthetic
uugccaaauauaugaauucuagg

SEQ ID NO: 2658 - RNA, 23 nt, Artificial
  Synthetic
ugccaaauauaugaauucuagga

SEQ ID NO: 2659 - RNA, 23 nt, Artificial
  Synthetic
gccaaauauaugaauucuaggau

SEQ ID NO: 2660 - RNA, 23 nt, Artificial
  Synthetic
ccaaauauaugaauucuaggauu

SEQ ID NO: 2661 - RNA, 23 nt, Artificial
  Synthetic
ucuuucagggaagaucuauuaac

SEQ ID NO: 2662 - RNA, 23 nt, Artificial
  Synthetic
cuuucagggaagaucuauuaacu

SEQ ID NO: 2663 - RNA, 23 nt, Artificial
  Synthetic
uuucagggaagaucuauuaacuc

SEQ ID NO: 2664 - RNA, 23 nt, Artificial
  Synthetic
uucagggaagaucuauuaacucc

SEQ ID NO: 2665 - RNA, 23 nt, Artificial
  Synthetic
agucacuaguagaaaguauaauu

SEQ ID NO: 2666 - RNA, 23 nt, Artificial
  Synthetic
cacuaguagaaaguauaauuuca

SEQ ID NO: 2667 - RNA, 23 nt, Artificial
  Synthetic
auuucaagacagaauauucuaga

SEQ ID NO: 2668 - RNA, 23 nt, Artificial
  Synthetic
uuucaagacagaauauucuagac

SEQ ID NO: 2669 - RNA, 23 nt, Artificial
  Synthetic
aauauucuagacaugcuagcagu

SEQ ID NO: 2670 - RNA, 23 nt, Artificial
  Synthetic
ucuagacaugcuagcaguuuaua

SEQ ID NO: 2671 - RNA, 23 nt, Artificial
  Synthetic
cuagacaugcuagcaguuuauau

SEQ ID NO: 2672 - RNA, 23 nt, Artificial
  Synthetic
uagacaugcuagcaguuuauaug

SEQ ID NO: 2673 - RNA, 23 nt, Artificial
  Synthetic
agacaugcuagcaguuuauaugu

SEQ ID NO: 2674 - RNA, 23 nt, Artificial
  Synthetic
gacaugcuagcaguuuauaugua

SEQ ID NO: 2675 - RNA, 23 nt, Artificial
  Synthetic
acaugcuagcaguuuauauguau

SEQ ID NO: 2676 - RNA, 23 nt, Artificial
  Synthetic
caugcuagcaguuuauauguauu

SEQ ID NO: 2677 - RNA, 23 nt, Artificial
  Synthetic
augcuagcaguuuauauguauuc

SEQ ID NO: 2678 - RNA, 23 nt, Artificial
  Synthetic
gcuagcaguuuauauguauucau

SEQ ID NO: 2679 - RNA, 23 nt, Artificial
  Synthetic
cuagcaguuuauauguauucaug

SEQ ID NO: 2680 - RNA, 23 nt, Artificial
  Synthetic
uagcaguuuauauguauucauga

SEQ ID NO: 2681 - RNA, 23 nt, Artificial
  Synthetic
ugaguaaugugauauauauuggg

SEQ ID NO: 2682 - RNA, 23 nt, Artificial
  Synthetic
aggaggaaugagugacuauaagg

SEQ ID NO: 2683 - RNA, 23 nt, Artificial
  Synthetic
ggaggaaugagugacuauaagga

SEQ ID NO: 2684 - RNA, 23 nt, Artificial
  Synthetic
gaggaaugagugacuauaaggau

SEQ ID NO: 2685 - RNA, 23 nt, Artificial
  Synthetic
aggaaugagugacuauaaggaug

SEQ ID NO: 2686 - RNA, 23 nt, Artificial
  Synthetic
ggaaugagugacuauaaggaugg

SEQ ID NO: 2687 - RNA, 23 nt, Artificial
  Synthetic
augagugacuauaaggaugguua

SEQ ID NO: 2688 - RNA, 23 nt, Artificial
  Synthetic
agugacuauaaggaugguuacca

SEQ ID NO: 2689 - RNA, 23 nt, Artificial
  Synthetic
gugacuauaaggaugguuaccau

SEQ ID NO: 2690 - RNA, 23 nt, Artificial
  Synthetic
ugacuauaaggaugguuaccaua

SEQ ID NO: 2691 - RNA, 23 nt, Artificial
  Synthetic
aggaugguuaccauagaaacuuc

SEQ ID NO: 2692 - RNA, 23 nt, Artificial
  Synthetic
ugguuaccauagaaacuuccuuu

SEQ ID NO: 2693 - RNA, 23 nt, Artificial
  Synthetic
gguuaccauagaaacuuccuuuu

SEQ ID NO: 2694 - RNA, 23 nt, Artificial
  Synthetic
acuacuacagagugcuaagcugc

SEQ ID NO: 2695 - RNA, 23 nt, Artificial
  Synthetic
acagagugcuaagcugcaugugu

SEQ ID NO: 2696 - RNA, 23 nt, Artificial
  Synthetic
cagagugcuaagcugcauguguc

SEQ ID NO: 2697 - RNA, 23 nt, Artificial
  Synthetic
gcuaagcugcaugugucaucuua

SEQ ID NO: 2698 - RNA, 23 nt, Artificial
  Synthetic
aagcugcaugugucaucuuacac

SEQ ID NO: 2699 - RNA, 23 nt, Artificial
  Synthetic
agcugcaugugucaucuuacacu

SEQ ID NO: 2700 - RNA, 23 nt, Artificial
  Synthetic
gcugcaugugucaucuuacacua

SEQ ID NO: 2701 - RNA, 23 nt, Artificial
  Synthetic
acuagagagaaaugguaaguuuc

SEQ ID NO: 2702 - RNA, 23 nt, Artificial
  Synthetic
uagagagaaaugguaaguuucuu

SEQ ID NO: 2703 - RNA, 23 nt, Artificial
  Synthetic
agagagaaaugguaaguuucuug

SEQ ID NO: 2704 - RNA, 23 nt, Artificial
  Synthetic
gagagaaaugguaaguuucuugu

SEQ ID NO: 2705 - RNA, 23 nt, Artificial
  Synthetic
agagaaaugguaaguuucuuguu

SEQ ID NO: 2706 - RNA, 23 nt, Artificial
  Synthetic
gagaaaugguaaguuucuuguuu

SEQ ID NO: 2707 - RNA, 23 nt, Artificial
  Synthetic
agaaaugguaaguuucuuguuuu

SEQ ID NO: 2708 - RNA, 23 nt, Artificial
  Synthetic
guuauugaacaguauauuucagg

SEQ ID NO: 2709 - RNA, 23 nt, Artificial
  Synthetic
uuauugaacaguauauuucagga

SEQ ID NO: 2710 - RNA, 23 nt, Artificial
  Synthetic
aacaguauauuucaggaagguua

SEQ ID NO: 2711 - RNA, 23 nt, Artificial
  Synthetic
aucuaccuaaagcagcauauuuu

SEQ ID NO: 2712 - RNA, 23 nt, Artificial
  Synthetic
gaaaguugugaccaugaauuuaa

SEQ ID NO: 2713 - RNA, 23 nt, Artificial
  Synthetic
ggauuuauguggauacaaauucu

SEQ ID NO: 2714 - RNA, 23 nt, Artificial
  Synthetic
gauuuauguggauacaaauucuc

SEQ ID NO: 2715 - RNA, 23 nt, Artificial
  Synthetic
auuuauguggauacaaauucucc

SEQ ID NO: 2716 - RNA, 23 nt, Artificial
  Synthetic
uuauguggauacaaauucuccuu

SEQ ID NO: 2717 - RNA, 23 nt, Artificial
  Synthetic
guggauacaaauucuccuuuaaa

SEQ ID NO: 2718 - RNA, 23 nt, Artificial
  Synthetic
ggauacaaauucuccuuuaaagu

SEQ ID NO: 2719 - RNA, 23 nt, Artificial
  Synthetic
gauacaaauucuccuuuaaagug

SEQ ID NO: 2720 - RNA, 23 nt, Artificial
  Synthetic
auacaaauucuccuuuaaagugu

SEQ ID NO: 2721 - RNA, 23 nt, Artificial
  Synthetic
uacaaauucuccuuuaaaguguu

SEQ ID NO: 2722 - RNA, 23 nt, Artificial
  Synthetic
caaauucuccuuuaaaguguuuc

SEQ ID NO: 2723 - RNA, 23 nt, Artificial
  Synthetic
aauucuccuuuaaaguguuucuu

SEQ ID NO: 2724 - RNA, 23 nt, Artificial
  Synthetic
auucuccuuuaaaguguuucuuc

SEQ ID NO: 2725 - RNA, 23 nt, Artificial
  Synthetic
uucuccuuuaaaguguuucuucc

SEQ ID NO: 2726 - RNA, 23 nt, Artificial
  Synthetic
ucuccuuuaaaguguuucuuccc

SEQ ID NO: 2727 - RNA, 23 nt, Artificial
  Synthetic
cuccuuuaaaguguuucuucccu

SEQ ID NO: 2728 - RNA, 23 nt, Artificial
  Synthetic
ccuuuaaaguguuucuucccuua

SEQ ID NO: 2729 - RNA, 23 nt, Artificial
  Synthetic
uaaaguguuucuucccuuaauau

SEQ ID NO: 2730 - RNA, 23 nt, Artificial
  Synthetic
aaaguguuucuucccuuaauauu

SEQ ID NO: 2731 - RNA, 23 nt, Artificial
  Synthetic
aaguguuucuucccuuaauauuu

SEQ ID NO: 2732 - RNA, 23 nt, Artificial
  Synthetic
guguuucuucccuuaauauuuau

SEQ ID NO: 2733 - RNA, 23 nt, Artificial
  Synthetic
guuucuucccuuaauauuuaucu

SEQ ID NO: 2734 - RNA, 23 nt, Artificial
  Synthetic
uucuucccuuaauauuuaucuga

SEQ ID NO: 2735 - RNA, 23 nt, Artificial
  Synthetic
gacuuacauucucccaaguuauu

SEQ ID NO: 2736 - RNA, 23 nt, Artificial
  Synthetic
acuuacauucucccaaguuauuc

SEQ ID NO: 2737 - RNA, 23 nt, Artificial
  Synthetic
cuuacauucucccaaguuauuca

SEQ ID NO: 2738 - RNA, 23 nt, Artificial
  Synthetic
uuacauucucccaaguuauucag

SEQ ID NO: 2739 - RNA, 23 nt, Artificial
  Synthetic
uacauucucccaaguuauucagc

SEQ ID NO: 2740 - RNA, 23 nt, Artificial
  Synthetic
acauucucccaaguuauucagcc

SEQ ID NO: 2741 - RNA, 23 nt, Artificial
  Synthetic
ccaaguuauucagccucauauga

SEQ ID NO: 2742 - RNA, 23 nt, Artificial
  Synthetic
caaguuauucagccucauaugac

SEQ ID NO: 2743 - RNA, 23 nt, Artificial
  Synthetic
aaguuauucagccucauaugacu

SEQ ID NO: 2744 - RNA, 23 nt, Artificial
  Synthetic
aaacaguucagagugcacuuugg

SEQ ID NO: 2745 - RNA, 23 nt, Artificial
  Synthetic
aacaguucagagugcacuuuggc

SEQ ID NO: 2746 - RNA, 23 nt, Artificial
  Synthetic
caguucagagugcacuuuggcac

SEQ ID NO: 2747 - RNA, 23 nt, Artificial
  Synthetic
agugcacuuuggcacacaauugg

SEQ ID NO: 2748 - RNA, 23 nt, Artificial
  Synthetic
ggaacagaacaaucuaaugugug

SEQ ID NO: 2749 - RNA, 23 nt, Artificial
  Synthetic
gaacagaacaaucuaaugugugg

SEQ ID NO: 2750 - RNA, 23 nt, Artificial
  Synthetic
aacagaacaaucuaauguguggu

SEQ ID NO: 2751 - RNA, 23 nt, Artificial
  Synthetic
acagaacaaucuaaugugugguu

SEQ ID NO: 2752 - RNA, 23 nt, Artificial
  Synthetic
gaacaaucuaaugugugguuugg

SEQ ID NO: 2753 - RNA, 23 nt, Artificial
  Synthetic
aacaaucuaaugugugguuuggu

SEQ ID NO: 2754 - RNA, 23 nt, Artificial
  Synthetic
acaaucuaaugugugguuuggua

SEQ ID NO: 2755 - RNA, 23 nt, Artificial
  Synthetic
caaucuaaugugugguuugguau

SEQ ID NO: 2756 - RNA, 23 nt, Artificial
  Synthetic
aaucuaaugugugguuugguauu

SEQ ID NO: 2757 - RNA, 23 nt, Artificial
  Synthetic
ucuaaugugugguuugguauucc

SEQ ID NO: 2758 - RNA, 23 nt, Artificial
  Synthetic
cuaaugugugguuugguauucca

SEQ ID NO: 2759 - RNA, 23 nt, Artificial
  Synthetic
uaaugugugguuugguauuccaa

SEQ ID NO: 2760 - RNA, 23 nt, Artificial
  Synthetic
augugugguuugguauuccaagu

SEQ ID NO: 2761 - RNA, 23 nt, Artificial
  Synthetic
cagugugguguaaaggaauucau

SEQ ID NO: 2762 - RNA, 23 nt, Artificial
  Synthetic
gugugguguaaaggaauucauua

SEQ ID NO: 2763 - RNA, 23 nt, Artificial
  Synthetic
uuagccauggauguauucaugaa

SEQ ID NO: 2764 - RNA, 23 nt, Artificial
  Synthetic
cauggauguauucaugaaaggac

SEQ ID NO: 2765 - RNA, 23 nt, Artificial
  Synthetic
guauucaugaaaggacuuucaaa

SEQ ID NO: 2766 - RNA, 23 nt, Artificial
  Synthetic
ucaugaaaggacuuucaaaggcc

SEQ ID NO: 2767 - RNA, 23 nt, Artificial
  Synthetic
caugaaaggacuuucaaaggcca

SEQ ID NO: 2768 - RNA, 23 nt, Artificial
  Synthetic
gaggguguucucuauguaggcuc

SEQ ID NO: 2769 - RNA, 23 nt, Artificial
  Synthetic
guggcugagaagaccaaagagca

SEQ ID NO: 2770 - RNA, 23 nt, Artificial
  Synthetic
gagaagaccaaagagcaagugac

SEQ ID NO: 2771 - RNA, 23 nt, Artificial
  Synthetic
auccugacaaugaggcuuaugaa

SEQ ID NO: 2772 - RNA, 23 nt, Artificial
  Synthetic
gacaaugaggcuuaugaaaugcc

SEQ ID NO: 2773 - RNA, 23 nt, Artificial
  Synthetic
acaaugaggcuuaugaaaugccu

SEQ ID NO: 2774 - RNA, 23 nt, Artificial
  Synthetic
uaugaaaugccuucugaggaagg

SEQ ID NO: 2775 - RNA, 23 nt, Artificial
  Synthetic
ggaaggguaucaagacuacgaac

SEQ ID NO: 2776 - RNA, 23 nt, Artificial
  Synthetic
gaaggguaucaagacuacgaacc

SEQ ID NO: 2777 - RNA, 23 nt, Artificial
  Synthetic
gaaccugaagccuaagaaauauc

SEQ ID NO: 2778 - RNA, 23 nt, Artificial
  Synthetic
accugaagccuaagaaauaucuu

SEQ ID NO: 2779 - RNA, 23 nt, Artificial
  Synthetic
cugaagccuaagaaauaucuuug

SEQ ID NO: 2780 - RNA, 23 nt, Artificial
  Synthetic
gccuaagaaauaucuuugcuccc

SEQ ID NO: 2781 - RNA, 23 nt, Artificial
  Synthetic
aaauaucuuugcucccaguuucu

SEQ ID NO: 2782 - RNA, 23 nt, Artificial
  Synthetic
cuuugcucccaguuucuugagau

SEQ ID NO: 2783 - RNA, 23 nt, Artificial
  Synthetic
uuugcucccaguuucuugagauc

SEQ ID NO: 2784 - RNA, 23 nt, Artificial
  Synthetic
uccuguacaagugcucaguucca

SEQ ID NO: 2785 - RNA, 23 nt, Artificial
  Synthetic
cuguacaagugcucaguuccaau

SEQ ID NO: 2786 - RNA, 23 nt, Artificial
  Synthetic
gcccagucaugacauuucucaaa

SEQ ID NO: 2787 - RNA, 23 nt, Artificial
  Synthetic
agucuuccaucagcagugauuga

SEQ ID NO: 2788 - RNA, 23 nt, Artificial
  Synthetic
ucuuccaucagcagugauugaag

SEQ ID NO: 2789 - RNA, 23 nt, Artificial
  Synthetic
uuccaucagcagugauugaagua

SEQ ID NO: 2790 - RNA, 23 nt, Artificial
  Synthetic
ccaucagcagugauugaaguauc

SEQ ID NO: 2791 - RNA, 23 nt, Artificial
  Synthetic
cagcagugauugaaguaucugua

SEQ ID NO: 2792 - RNA, 23 nt, Artificial
  Synthetic
ugcuucccuuucacugaagugaa

SEQ ID NO: 2793 - RNA, 23 nt, Artificial
  Synthetic
cuuucacugaagugaauacaugg

SEQ ID NO: 2794 - RNA, 23 nt, Artificial
  Synthetic
uuucacugaagugaauacauggu

SEQ ID NO: 2795 - RNA, 23 nt, Artificial
  Synthetic
ucacugaagugaauacaugguag

SEQ ID NO: 2796 - RNA, 23 nt, Artificial
  Synthetic
gacuaccacuuauuucuaaaucc

SEQ ID NO: 2797 - RNA, 23 nt, Artificial
  Synthetic
acuaccacuuauuucuaaauccu

SEQ ID NO: 2798 - RNA, 23 nt, Artificial
  Synthetic
uaccacuuauuucuaaauccuca

SEQ ID NO: 2799 - RNA, 23 nt, Artificial
  Synthetic
gaaguuguuagugauuugcuauc

SEQ ID NO: 2800 - RNA, 23 nt, Artificial
  Synthetic
ugauacugucuaagaauaaugac

SEQ ID NO: 2801 - RNA, 23 nt, Artificial
  Synthetic
aaauaugugagcaugaaacuaug

SEQ ID NO: 2802 - RNA, 23 nt, Artificial
  Synthetic
aauaugugagcaugaaacuaugc

SEQ ID NO: 2803 - RNA, 23 nt, Artificial
  Synthetic
uaugugagcaugaaacuaugcac

SEQ ID NO: 2804 - RNA, 23 nt, Artificial
  Synthetic
gaaacuaugcaccuauaaauacu

SEQ ID NO: 2805 - RNA, 23 nt, Artificial
  Synthetic
aacuaugcaccuauaaauacuaa

SEQ ID NO: 2806 - RNA, 23 nt, Artificial
  Synthetic
uguguuuguauauaaauggugag

SEQ ID NO: 2807 - RNA, 23 nt, Artificial
  Synthetic
aucccaucucacuuuaauaauaa

SEQ ID NO: 2808 - RNA, 23 nt, Artificial
  Synthetic
acauauuagcacauucaaggcuc

SEQ ID NO: 2809 - RNA, 23 nt, Artificial
  Synthetic
uccuuuaaauguugccaaauaua

SEQ ID NO: 2810 - RNA, 23 nt, Artificial
  Synthetic
ccaaauauaugaauucuaggauu

SEQ ID NO: 2811 - RNA, 23 nt, Artificial
  Synthetic
ucucuuucagggaagaucuauua

SEQ ID NO: 2812 - RNA, 23 nt, Artificial
  Synthetic
cagaauauucuagacaugcuagc

SEQ ID NO: 2813 - RNA, 23 nt, Artificial
  Synthetic
aauauucuagacaugcuagcagu

SEQ ID NO: 2814 - RNA, 23 nt, Artificial
  Synthetic
uucuagacaugcuagcaguuuau

SEQ ID NO: 2815 - RNA, 23 nt, Artificial
  Synthetic
caugcuagcaguuuauauguauu

SEQ ID NO: 2816 - RNA, 23 nt, Artificial
  Synthetic
augcuagcaguuuauauguauuc

SEQ ID NO: 2817 - RNA, 23 nt, Artificial
  Synthetic
agcaguuuauauguauucaugag

SEQ ID NO: 2818 - RNA, 23 nt, Artificial
  Synthetic
auguauucaugaguaaugugaua

SEQ ID NO: 2819 - RNA, 23 nt, Artificial
  Synthetic
aggaaugagugacuauaaggaug

SEQ ID NO: 2820 - RNA, 23 nt, Artificial
  Synthetic
augagugacuauaaggaugguua

SEQ ID NO: 2821 - RNA, 23 nt, Artificial
  Synthetic
gugacuauaaggaugguuaccau

SEQ ID NO: 2822 - RNA, 23 nt, Artificial
  Synthetic
uauaaggaugguuaccauagaaa

SEQ ID NO: 2823 - RNA, 23 nt, Artificial
  Synthetic
aggaugguuaccauagaaacuuc

SEQ ID NO: 2824 - RNA, 23 nt, Artificial
  Synthetic
ggaugguuaccauagaaacuucc

SEQ ID NO: 2825 - RNA, 23 nt, Artificial
  Synthetic
ugguuaccauagaaacuuccuuu

SEQ ID NO: 2826 - RNA, 23 nt, Artificial
  Synthetic
gguuaccauagaaacuuccuuuu

SEQ ID NO: 2827 - RNA, 23 nt, Artificial
  Synthetic
gacuacuacagagugcuaagcug

SEQ ID NO: 2828 - RNA, 23 nt, Artificial
  Synthetic
agugcuaagcugcaugugucauc

SEQ ID NO: 2829 - RNA, 23 nt, Artificial
  Synthetic
gcugcaugugucaucuuacacua

SEQ ID NO: 2830 - RNA, 23 nt, Artificial
  Synthetic
acuagagagaaaugguaaguuuc

SEQ ID NO: 2831 - RNA, 23 nt, Artificial
  Synthetic
cuagagagaaaugguaaguuucu

SEQ ID NO: 2832 - RNA, 23 nt, Artificial
  Synthetic
uauugaacaguauauuucaggaa

SEQ ID NO: 2833 - RNA, 23 nt, Artificial
  Synthetic
aacaguauauuucaggaagguua

SEQ ID NO: 2834 - RNA, 23 nt, Artificial
  Synthetic
uaggaaaguugugaccaugaauu

SEQ ID NO: 2835 - RNA, 23 nt, Artificial
  Synthetic
ggauuuauguggauacaaauucu

SEQ ID NO: 2836 - RNA, 23 nt, Artificial
  Synthetic
uuuauguggauacaaauucuccu

SEQ ID NO: 2837 - RNA, 23 nt, Artificial
  Synthetic
acaaauucuccuuuaaaguguuu

SEQ ID NO: 2838 - RNA, 23 nt, Artificial
  Synthetic
aaauucuccuuuaaaguguuucu

SEQ ID NO: 2839 - RNA, 23 nt, Artificial
  Synthetic
ucuccuuuaaaguguuucuuccc

SEQ ID NO: 2840 - RNA, 23 nt, Artificial
  Synthetic
uccuuuaaaguguuucuucccuu

SEQ ID NO: 2841 - RNA, 23 nt, Artificial
  Synthetic
ccuuuaaaguguuucuucccuua

SEQ ID NO: 2842 - RNA, 23 nt, Artificial
  Synthetic
gacuuacauucucccaaguuauu

SEQ ID NO: 2843 - RNA, 23 nt, Artificial
  Synthetic
acauucucccaaguuauucagcc

SEQ ID NO: 2844 - RNA, 23 nt, Artificial
  Synthetic
aguuauucagccucauaugacuc

SEQ ID NO: 2845 - RNA, 23 nt, Artificial
  Synthetic
acagaacaaucuaaugugugguu

SEQ ID NO: 2846 - RNA, 23 nt, Artificial
  Synthetic
agaacaaucuaaugugugguuug

SEQ ID NO: 2847 - RNA, 23 nt, Artificial
  Synthetic
cuaaugugugguuugguauucca

SEQ ID NO: 2848 - RNA, 23 nt, Artificial
  Synthetic
uaaugugugguuugguauuccaa

SEQ ID NO: 2849 - RNA, 23 nt, Artificial
  Synthetic
augugugguuugguauuccaagu

SEQ ID NO: 2850 - RNA, 23 nt, Artificial
  Synthetic
aguggccauucgacgacagugug

SEQ ID NO: 2851 - RNA, 23 nt, Artificial
  Synthetic
ucgacgacagugugguguaaagg

SEQ ID NO: 2852 - RNA, 23 nt, Artificial
  Synthetic
uagccauggauguauucaugaaa

SEQ ID NO: 2853 - RNA, 23 nt, Artificial
  Synthetic
ccauggauguauucaugaaagga

SEQ ID NO: 2854 - RNA, 23 nt, Artificial
  Synthetic
agaggguguucucuauguaggcu

SEQ ID NO: 2855 - RNA, 23 nt, Artificial
  Synthetic
accaaagagcaagugacaaaugu

SEQ ID NO: 2856 - RNA, 23 nt, Artificial
  Synthetic
agagcaagugacaaauguuggag

SEQ ID NO: 2857 - RNA, 23 nt, Artificial
  Synthetic
ugacaaugaggcuuaugaaaugc

SEQ ID NO: 2858 - RNA, 23 nt, Artificial
  Synthetic
cccaguuucuugagaucugcuga

SEQ ID NO: 2859 - RNA, 23 nt, Artificial
  Synthetic
ccuguacaagugcucaguuccaa

SEQ ID NO: 2860 - RNA, 23 nt, Artificial
  Synthetic
uacaagugcucaguuccaaugug

SEQ ID NO: 2861 - RNA, 23 nt, Artificial
  Synthetic
cagucaugacauuucucaaaguu

SEQ ID NO: 2862 - RNA, 23 nt, Artificial
  Synthetic
ucucgaagucuuccaucagcagu

SEQ ID NO: 2863 - RNA, 23 nt, Artificial
  Synthetic
aucagcagugauugaaguaucug

SEQ ID NO: 2864 - RNA, 23 nt, Artificial
  Synthetic
gugcuucccuuucacugaaguga

SEQ ID NO: 2865 - RNA, 23 nt, Artificial
  Synthetic
uucacugaagugaauacauggua

SEQ ID NO: 2866 - RNA, 23 nt, Artificial
  Synthetic
acugaagugaauacaugguagca

SEQ ID NO: 2867 - RNA, 23 nt, Artificial
  Synthetic
accuaagugacuaccacuuauuu

SEQ ID NO: 2868 - RNA, 23 nt, Artificial
  Synthetic
ugacuaccacuuauuucuaaauc

SEQ ID NO: 2869 - RNA, 23 nt, Artificial
  Synthetic
auaugugagcaugaaacuaugca

SEQ ID NO: 2870 - RNA, 23 nt, Artificial
  Synthetic
caacacugccagaaguguguuuu

SEQ ID NO: 2871 - RNA, 23 nt, Artificial
  Synthetic
gccaaauauaugaauucuaggau

SEQ ID NO: 2872 - RNA, 23 nt, Artificial
  Synthetic
aagucacuaguagaaaguauaau

SEQ ID NO: 2873 - RNA, 23 nt, Artificial
  Synthetic
uucaagacagaauauucuagaca

SEQ ID NO: 2874 - RNA, 23 nt, Artificial
  Synthetic
ugcuagcaguuuauauguauuca

SEQ ID NO: 2875 - RNA, 23 nt, Artificial
  Synthetic
agugacuauaaggaugguuacca

SEQ ID NO: 2876 - RNA, 23 nt, Artificial
  Synthetic
augguuaccauagaaacuuccuu

SEQ ID NO: 2877 - RNA, 23 nt, Artificial
  Synthetic
gcuaagcugcaugugucaucuua

SEQ ID NO: 2878 - RNA, 23 nt, Artificial
  Synthetic
aagcugcaugugucaucuuacac

SEQ ID NO: 2879 - RNA, 23 nt, Artificial
  Synthetic
gaacaguauauuucaggaagguu

SEQ ID NO: 2880 - RNA, 23 nt, Artificial
  Synthetic
aaucuaccuaaagcagcauauuu

SEQ ID NO: 2881 - RNA, 23 nt, Artificial
  Synthetic
uauguggauacaaauucuccuuu

SEQ ID NO: 2882 - RNA, 23 nt, Artificial
  Synthetic
guggauacaaauucuccuuuaaa

SEQ ID NO: 2883 - RNA, 23 nt, Artificial
  Synthetic
caaauucuccuuuaaaguguuuc

SEQ ID NO: 2884 - RNA, 23 nt, Artificial
  Synthetic
aauucuccuuuaaaguguuucuu

SEQ ID NO: 2885 - RNA, 23 nt, Artificial
  Synthetic
uuaaaguguuucuucccuuaaua

SEQ ID NO: 2886 - RNA, 23 nt, Artificial
  Synthetic
agugcacuuuggcacacaauugg

SEQ ID NO: 2887 - RNA, 23 nt, Artificial
  Synthetic
cagaacaaucuaaugugugguuu

SEQ ID NO: 2888 - RNA, 23 nt, Artificial
  Synthetic
aucuaaugugugguuugguauuc

SEQ ID NO: 2889 - RNA, 23 nt, Artificial
  Synthetic
ucuaaugugugguuugguauucc

SEQ ID NO: 2890 - RNA, 21 nt, Artificial
  Synthetic
gacgacagugugguguaaaga

SEQ ID NO: 2891 - RNA, 21 nt, Artificial
  Synthetic
acgacagugugguguaaagga

SEQ ID NO: 2892 - RNA, 21 nt, Artificial
  Synthetic
cgacagugugguguaaaggaa

SEQ ID NO: 2893 - RNA, 21 nt, Artificial
  Synthetic
ugugguguaaaggaauucaua

SEQ ID NO: 2894 - RNA, 21 nt, Artificial
  Synthetic
gguguaaaggaauucauuaga

SEQ ID NO: 2895 - RNA, 21 nt, Artificial
  Synthetic
auuagccauggauguauucaa

SEQ ID NO: 2896 - RNA, 21 nt, Artificial
  Synthetic
uuagccauggauguauucaua

SEQ ID NO: 2897 - RNA, 21 nt, Artificial
  Synthetic
auggauguauucaugaaagga

SEQ ID NO: 2898 - RNA, 21 nt, Artificial
  Synthetic
auucaugaaaggacuuucaaa

SEQ ID NO: 2899 - RNA, 21 nt, Artificial
  Synthetic
ucaugaaaggacuuucaaaga

SEQ ID NO: 2900 - RNA, 21 nt, Artificial
  Synthetic
caugaaaggacuuucaaagga

SEQ ID NO: 2901 - RNA, 21 nt, Artificial
  Synthetic
augaaaggacuuucaaaggca

SEQ ID NO: 2902 - RNA, 21 nt, Artificial
  Synthetic
agaggguguucucuauguaga

SEQ ID NO: 2903 - RNA, 21 nt, Artificial
  Synthetic
gaggguguucucuauguagga

SEQ ID NO: 2904 - RNA, 21 nt, Artificial
  Synthetic
ggguguucucuauguaggcua

SEQ ID NO: 2905 - RNA, 21 nt, Artificial
  Synthetic
uggcugagaagaccaaagaga

SEQ ID NO: 2906 - RNA, 21 nt, Artificial
  Synthetic
ggcugagaagaccaaagagca

SEQ ID NO: 2907 - RNA, 21 nt, Artificial
  Synthetic
gaagaccaaagagcaagugaa

SEQ ID NO: 2908 - RNA, 21 nt, Artificial
  Synthetic
aagagcaagugacaaauguua

SEQ ID NO: 2909 - RNA, 21 nt, Artificial
  Synthetic
agagcaagugacaaauguuga

SEQ ID NO: 2910 - RNA, 21 nt, Artificial
  Synthetic
gagcaagugacaaauguugga

SEQ ID NO: 2911 - RNA, 21 nt, Artificial
  Synthetic
agcaagugacaaauguuggaa

SEQ ID NO: 2912 - RNA, 21 nt, Artificial
  Synthetic
uccugacaaugaggcuuauga

SEQ ID NO: 2913 - RNA, 21 nt, Artificial
  Synthetic
ccugacaaugaggcuuaugaa

SEQ ID NO: 2914 - RNA, 21 nt, Artificial
  Synthetic
cugacaaugaggcuuaugaaa

SEQ ID NO: 2915 - RNA, 21 nt, Artificial
  Synthetic
caaugaggcuuaugaaaugca

SEQ ID NO: 2916 - RNA, 21 nt, Artificial
  Synthetic
aaugaggcuuaugaaaugcca

SEQ ID NO: 2917 - RNA, 21 nt, Artificial
  Synthetic
ggcuuaugaaaugccuucuga

SEQ ID NO: 2918 - RNA, 21 nt, Artificial
  Synthetic
cuuaugaaaugccuucugaga

SEQ ID NO: 2919 - RNA, 21 nt, Artificial
  Synthetic
uuaugaaaugccuucugagga

SEQ ID NO: 2920 - RNA, 21 nt, Artificial
  Synthetic
aaggguaucaagacuacgaaa

SEQ ID NO: 2921 - RNA, 21 nt, Artificial
  Synthetic
aggguaucaagacuacgaaca

SEQ ID NO: 2922 - RNA, 21 nt, Artificial
  Synthetic
guaucaagacuacgaaccuga

SEQ ID NO: 2923 - RNA, 21 nt, Artificial
  Synthetic
accugaagccuaagaaauaua

SEQ ID NO: 2924 - RNA, 21 nt, Artificial
  Synthetic
ccugaagccuaagaaauauca

SEQ ID NO: 2925 - RNA, 21 nt, Artificial
  Synthetic
cugaagccuaagaaauaucua

SEQ ID NO: 2926 - RNA, 21 nt, Artificial
  Synthetic
ugaagccuaagaaauaucuua

SEQ ID NO: 2927 - RNA, 21 nt, Artificial
  Synthetic
gaagccuaagaaauaucuuua

SEQ ID NO: 2928 - RNA, 21 nt, Artificial
  Synthetic
aagccuaagaaauaucuuuga

SEQ ID NO: 2929 - RNA, 21 nt, Artificial
  Synthetic
agccuaagaaauaucuuugca

SEQ ID NO: 2930 - RNA, 21 nt, Artificial
  Synthetic
gccuaagaaauaucuuugcua

SEQ ID NO: 2931 - RNA, 21 nt, Artificial
  Synthetic
ccuaagaaauaucuuugcuca

SEQ ID NO: 2932 - RNA, 21 nt, Artificial
  Synthetic
auaucuuugcucccaguuuca

SEQ ID NO: 2933 - RNA, 21 nt, Artificial
  Synthetic
uaucuuugcucccaguuucua

SEQ ID NO: 2934 - RNA, 21 nt, Artificial
  Synthetic
aucuuugcucccaguuucuua

SEQ ID NO: 2935 - RNA, 21 nt, Artificial
  Synthetic
ucuuugcucccaguuucuuga

SEQ ID NO: 2936 - RNA, 21 nt, Artificial
  Synthetic
cuuugcucccaguuucuugaa

SEQ ID NO: 2937 - RNA, 21 nt, Artificial
  Synthetic
uuugcucccaguuucuugaga

SEQ ID NO: 2938 - RNA, 21 nt, Artificial
  Synthetic
ucccaguuucuugagaucuga

SEQ ID NO: 2939 - RNA, 21 nt, Artificial
  Synthetic
caguuucuugagaucugcuga

SEQ ID NO: 2940 - RNA, 21 nt, Artificial
  Synthetic
aagugcucaguuccaauguga

SEQ ID NO: 2941 - RNA, 21 nt, Artificial
  Synthetic
agugcucaguuccaaugugca

SEQ ID NO: 2942 - RNA, 21 nt, Artificial
  Synthetic
ugcccagucaugacauuucua

SEQ ID NO: 2943 - RNA, 21 nt, Artificial
  Synthetic
gcccagucaugacauuucuca

SEQ ID NO: 2944 - RNA, 21 nt, Artificial
  Synthetic
cccagucaugacauuucucaa

SEQ ID NO: 2945 - RNA, 21 nt, Artificial
  Synthetic
ccagucaugacauuucucaaa

SEQ ID NO: 2946 - RNA, 21 nt, Artificial
  Synthetic
gucaugacauuucucaaagua

SEQ ID NO: 2947 - RNA, 21 nt, Artificial
  Synthetic
caugacauuucucaaaguuua

SEQ ID NO: 2948 - RNA, 21 nt, Artificial
  Synthetic
ucgaagucuuccaucagcaga

SEQ ID NO: 2949 - RNA, 21 nt, Artificial
  Synthetic
ucuuccaucagcagugauuga

SEQ ID NO: 2950 - RNA, 21 nt, Artificial
  Synthetic
uccaucagcagugauugaaga

SEQ ID NO: 2951 - RNA, 21 nt, Artificial
  Synthetic
ccaucagcagugauugaagua

SEQ ID NO: 2952 - RNA, 21 nt, Artificial
  Synthetic
aucagcagugauugaaguaua

SEQ ID NO: 2953 - RNA, 21 nt, Artificial
  Synthetic
agcagugauugaaguaucuga

SEQ ID NO: 2954 - RNA, 21 nt, Artificial
  Synthetic
gcagugauugaaguaucugua

SEQ ID NO: 2955 - RNA, 21 nt, Artificial
  Synthetic
gauugaaguaucuguaccuga

SEQ ID NO: 2956 - RNA, 21 nt, Artificial
  Synthetic
uucggugcuucccuuucacua

SEQ ID NO: 2957 - RNA, 21 nt, Artificial
  Synthetic
ucggugcuucccuuucacuga

SEQ ID NO: 2958 - RNA, 21 nt, Artificial
  Synthetic
cuucccuuucacugaagugaa

SEQ ID NO: 2959 - RNA, 21 nt, Artificial
  Synthetic
uuucacugaagugaauacaua

SEQ ID NO: 2960 - RNA, 21 nt, Artificial
  Synthetic
uucacugaagugaauacauga

SEQ ID NO: 2961 - RNA, 21 nt, Artificial
  Synthetic
cacugaagugaauacauggua

SEQ ID NO: 2962 - RNA, 21 nt, Artificial
  Synthetic
acugaagugaauacaugguaa

SEQ ID NO: 2963 - RNA, 21 nt, Artificial
  Synthetic
cugaagugaauacaugguaga

SEQ ID NO: 2964 - RNA, 21 nt, Artificial
  Synthetic
cuaagugacuaccacuuauua

SEQ ID NO: 2965 - RNA, 21 nt, Artificial
  Synthetic
uaagugacuaccacuuauuua

SEQ ID NO: 2966 - RNA, 21 nt, Artificial
  Synthetic
aagugacuaccacuuauuuca

SEQ ID NO: 2967 - RNA, 21 nt, Artificial
  Synthetic
agugacuaccacuuauuucua

SEQ ID NO: 2968 - RNA, 21 nt, Artificial
  Synthetic
gugacuaccacuuauuucuaa

SEQ ID NO: 2969 - RNA, 21 nt, Artificial
  Synthetic
ugacuaccacuuauuucuaaa

SEQ ID NO: 2970 - RNA, 21 nt, Artificial
  Synthetic
acuaccacuuauuucuaaaua

SEQ ID NO: 2971 - RNA, 21 nt, Artificial
  Synthetic
cuaccacuuauuucuaaauca

SEQ ID NO: 2972 - RNA, 21 nt, Artificial
  Synthetic
accacuuauuucuaaauccua

SEQ ID NO: 2973 - RNA, 21 nt, Artificial
  Synthetic
uugcuguuguucagaaguuga

SEQ ID NO: 2974 - RNA, 21 nt, Artificial
  Synthetic
ugcuguuguucagaaguugua

SEQ ID NO: 2975 - RNA, 21 nt, Artificial
  Synthetic
gcuguuguucagaaguuguua

SEQ ID NO: 2976 - RNA, 21 nt, Artificial
  Synthetic
cuguuguucagaaguuguuaa

SEQ ID NO: 2977 - RNA, 21 nt, Artificial
  Synthetic
uguuguucagaaguuguuaga

SEQ ID NO: 2978 - RNA, 21 nt, Artificial
  Synthetic
guuguucagaaguuguuagua

SEQ ID NO: 2979 - RNA, 21 nt, Artificial
  Synthetic
uuguucagaaguuguuaguga

SEQ ID NO: 2980 - RNA, 21 nt, Artificial
  Synthetic
uguucagaaguuguuagugaa

SEQ ID NO: 2981 - RNA, 21 nt, Artificial
  Synthetic
cagaaguuguuagugauuuga

SEQ ID NO: 2982 - RNA, 21 nt, Artificial
  Synthetic
gaaguuguuagugauuugcua

SEQ ID NO: 2983 - RNA, 21 nt, Artificial
  Synthetic
aaguuguuagugauuugcuaa

SEQ ID NO: 2984 - RNA, 21 nt, Artificial
  Synthetic
aguuguuagugauuugcuaua

SEQ ID NO: 2985 - RNA, 21 nt, Artificial
  Synthetic
gauacugucuaagaauaauga

SEQ ID NO: 2986 - RNA, 21 nt, Artificial
  Synthetic
auacugucuaagaauaaugaa

SEQ ID NO: 2987 - RNA, 21 nt, Artificial
  Synthetic
acguauugugaaauuuguuaa

SEQ ID NO: 2988 - RNA, 21 nt, Artificial
  Synthetic
uaugugagcaugaaacuauga

SEQ ID NO: 2989 - RNA, 21 nt, Artificial
  Synthetic
ugugagcaugaaacuaugcaa

SEQ ID NO: 2990 - RNA, 21 nt, Artificial
  Synthetic
gaaacuaugcaccuauaaaua

SEQ ID NO: 2991 - RNA, 21 nt, Artificial
  Synthetic
aaacuaugcaccuauaaauaa

SEQ ID NO: 2992 - RNA, 21 nt, Artificial
  Synthetic
aacuaugcaccuauaaauaca

SEQ ID NO: 2993 - RNA, 21 nt, Artificial
  Synthetic
acuaugcaccuauaaauacua

SEQ ID NO: 2994 - RNA, 21 nt, Artificial
  Synthetic
cuaugcaccuauaaauacuaa

SEQ ID NO: 2995 - RNA, 21 nt, Artificial
  Synthetic
cuuguguuuguauauaaauga

SEQ ID NO: 2996 - RNA, 21 nt, Artificial
  Synthetic
uuguguuuguauauaaaugga

SEQ ID NO: 2997 - RNA, 21 nt, Artificial
  Synthetic
uguguuuguauauaaauggua

SEQ ID NO: 2998 - RNA, 21 nt, Artificial
  Synthetic
guguuuguauauaaaugguga

SEQ ID NO: 2999 - RNA, 21 nt, Artificial
  Synthetic
uguuuguauauaaauggugaa

SEQ ID NO: 3000 - RNA, 21 nt, Artificial
  Synthetic
uaucccaucucacuuuaauaa

SEQ ID NO: 3001 - RNA, 21 nt, Artificial
  Synthetic
aucccaucucacuuuaauaaa

SEQ ID NO: 3002 - RNA, 21 nt, Artificial
  Synthetic
ucccaucucacuuuaauaaua

SEQ ID NO: 3003 - RNA, 21 nt, Artificial
  Synthetic
cccaucucacuuuaauaauaa

SEQ ID NO: 3004 - RNA, 21 nt, Artificial
  Synthetic
gcacauauuagcacauucaaa

SEQ ID NO: 3005 - RNA, 21 nt, Artificial
  Synthetic
auauuagcacauucaaggcua

SEQ ID NO: 3006 - RNA, 21 nt, Artificial
  Synthetic
uacaggaaaugccuuuaaaca

SEQ ID NO: 3007 - RNA, 21 nt, Artificial
  Synthetic
acaggaaaugccuuuaaacaa

SEQ ID NO: 3008 - RNA, 21 nt, Artificial
  Synthetic
cuuuaaauguugccaaauaua

SEQ ID NO: 3009 - RNA, 21 nt, Artificial
  Synthetic
uuuaaauguugccaaauauaa

SEQ ID NO: 3010 - RNA, 21 nt, Artificial
  Synthetic
uugccaaauauaugaauucua

SEQ ID NO: 3011 - RNA, 21 nt, Artificial
  Synthetic
ugccaaauauaugaauucuaa

SEQ ID NO: 3012 - RNA, 21 nt, Artificial
  Synthetic
gccaaauauaugaauucuaga

SEQ ID NO: 3013 - RNA, 21 nt, Artificial
  Synthetic
ccaaauauaugaauucuagga

SEQ ID NO: 3014 - RNA, 21 nt, Artificial
  Synthetic
caaauauaugaauucuaggaa

SEQ ID NO: 3015 - RNA, 21 nt, Artificial
  Synthetic
aaauauaugaauucuaggaua

SEQ ID NO: 3016 - RNA, 21 nt, Artificial
  Synthetic
uuucagggaagaucuauuaaa

SEQ ID NO: 3017 - RNA, 21 nt, Artificial
  Synthetic
uucagggaagaucuauuaaca

SEQ ID NO: 3018 - RNA, 21 nt, Artificial
  Synthetic
ucagggaagaucuauuaacua

SEQ ID NO: 3019 - RNA, 21 nt, Artificial
  Synthetic
cagggaagaucuauuaacuca

SEQ ID NO: 3020 - RNA, 21 nt, Artificial
  Synthetic
ucacuaguagaaaguauaaua

SEQ ID NO: 3021 - RNA, 21 nt, Artificial
  Synthetic
cuaguagaaaguauaauuuca

SEQ ID NO: 3022 - RNA, 21 nt, Artificial
  Synthetic
uucaagacagaauauucuaga

SEQ ID NO: 3023 - RNA, 21 nt, Artificial
  Synthetic
ucaagacagaauauucuagaa

SEQ ID NO: 3024 - RNA, 21 nt, Artificial
  Synthetic
uauucuagacaugcuagcaga

SEQ ID NO: 3025 - RNA, 21 nt, Artificial
  Synthetic
uagacaugcuagcaguuuaua

SEQ ID NO: 3026 - RNA, 21 nt, Artificial
  Synthetic
agacaugcuagcaguuuauaa

SEQ ID NO: 3027 - RNA, 21 nt, Artificial
  Synthetic
gacaugcuagcaguuuauaua

SEQ ID NO: 3028 - RNA, 21 nt, Artificial
  Synthetic
acaugcuagcaguuuauauga

SEQ ID NO: 3029 - RNA, 21 nt, Artificial
  Synthetic
caugcuagcaguuuauaugua

SEQ ID NO: 3030 - RNA, 21 nt, Artificial
  Synthetic
augcuagcaguuuauauguaa

SEQ ID NO: 3031 - RNA, 21 nt, Artificial
  Synthetic
ugcuagcaguuuauauguaua

SEQ ID NO: 3032 - RNA, 21 nt, Artificial
  Synthetic
gcuagcaguuuauauguauua

SEQ ID NO: 3033 - RNA, 21 nt, Artificial
  Synthetic
uagcaguuuauauguauucaa

SEQ ID NO: 3034 - RNA, 21 nt, Artificial
  Synthetic
agcaguuuauauguauucaua

SEQ ID NO: 3035 - RNA, 21 nt, Artificial
  Synthetic
gcaguuuauauguauucauga

SEQ ID NO: 3036 - RNA, 21 nt, Artificial
  Synthetic
aguaaugugauauauauugga

SEQ ID NO: 3037 - RNA, 21 nt, Artificial
  Synthetic
gaggaaugagugacuauaaga

SEQ ID NO: 3038 - RNA, 21 nt, Artificial
  Synthetic
aggaaugagugacuauaagga

SEQ ID NO: 3039 - RNA, 21 nt, Artificial
  Synthetic
ggaaugagugacuauaaggaa

SEQ ID NO: 3040 - RNA, 21 nt, Artificial
  Synthetic
gaaugagugacuauaaggaua

SEQ ID NO: 3041 - RNA, 21 nt, Artificial
  Synthetic
aaugagugacuauaaggauga

SEQ ID NO: 3042 - RNA, 21 nt, Artificial
  Synthetic
gagugacuauaaggaugguua

SEQ ID NO: 3043 - RNA, 21 nt, Artificial
  Synthetic
ugacuauaaggaugguuacca

SEQ ID NO: 3044 - RNA, 21 nt, Artificial
  Synthetic
gacuauaaggaugguuaccaa

SEQ ID NO: 3045 - RNA, 21 nt, Artificial
  Synthetic
acuauaaggaugguuaccaua

SEQ ID NO: 3046 - RNA, 21 nt, Artificial
  Synthetic
gaugguuaccauagaaacuua

SEQ ID NO: 3047 - RNA, 21 nt, Artificial
  Synthetic
guuaccauagaaacuuccuua

SEQ ID NO: 3048 - RNA, 21 nt, Artificial
  Synthetic
uuaccauagaaacuuccuuua

SEQ ID NO: 3049 - RNA, 21 nt, Artificial
  Synthetic
uacuacagagugcuaagcuga

SEQ ID NO: 3050 - RNA, 21 nt, Artificial
  Synthetic
agagugcuaagcugcauguga

SEQ ID NO: 3051 - RNA, 21 nt, Artificial
  Synthetic
gagugcuaagcugcaugugua

SEQ ID NO: 3052 - RNA, 21 nt, Artificial
  Synthetic
uaagcugcaugugucaucuua

SEQ ID NO: 3053 - RNA, 21 nt, Artificial
  Synthetic
gcugcaugugucaucuuacaa

SEQ ID NO: 3054 - RNA, 21 nt, Artificial
  Synthetic
cugcaugugucaucuuacaca

SEQ ID NO: 3055 - RNA, 21 nt, Artificial
  Synthetic
ugcaugugucaucuuacacua

SEQ ID NO: 3056 - RNA, 21 nt, Artificial
  Synthetic
uagagagaaaugguaaguuua

SEQ ID NO: 3057 - RNA, 21 nt, Artificial
  Synthetic
gagagaaaugguaaguuucua

SEQ ID NO: 3058 - RNA, 21 nt, Artificial
  Synthetic
agagaaaugguaaguuucuua

SEQ ID NO: 3059 - RNA, 21 nt, Artificial
  Synthetic
gagaaaugguaaguuucuuga

SEQ ID NO: 3060 - RNA, 21 nt, Artificial
  Synthetic
agaaaugguaaguuucuugua

SEQ ID NO: 3061 - RNA, 21 nt, Artificial
  Synthetic
gaaaugguaaguuucuuguua

SEQ ID NO: 3062 - RNA, 21 nt, Artificial
  Synthetic
aaaugguaaguuucuuguuua

SEQ ID NO: 3063 - RNA, 21 nt, Artificial
  Synthetic
uauugaacaguauauuucaga

SEQ ID NO: 3064 - RNA, 21 nt, Artificial
  Synthetic
auugaacaguauauuucagga

SEQ ID NO: 3065 - RNA, 21 nt, Artificial
  Synthetic
caguauauuucaggaagguua

SEQ ID NO: 3066 - RNA, 21 nt, Artificial
  Synthetic
cuaccuaaagcagcauauuua

SEQ ID NO: 3067 - RNA, 21 nt, Artificial
  Synthetic
aaguugugaccaugaauuuaa

SEQ ID NO: 3068 - RNA, 21 nt, Artificial
  Synthetic
auuuauguggauacaaauuca

SEQ ID NO: 3069 - RNA, 21 nt, Artificial
  Synthetic
uuuauguggauacaaauucua

SEQ ID NO: 3070 - RNA, 21 nt, Artificial
  Synthetic
uuauguggauacaaauucuca

SEQ ID NO: 3071 - RNA, 21 nt, Artificial
  Synthetic
auguggauacaaauucuccua

SEQ ID NO: 3072 - RNA, 21 nt, Artificial
  Synthetic
ggauacaaauucuccuuuaaa

SEQ ID NO: 3073 - RNA, 21 nt, Artificial
  Synthetic
auacaaauucuccuuuaaaga

SEQ ID NO: 3074 - RNA, 21 nt, Artificial
  Synthetic
uacaaauucuccuuuaaagua

SEQ ID NO: 3075 - RNA, 21 nt, Artificial
  Synthetic
acaaauucuccuuuaaaguga

SEQ ID NO: 3076 - RNA, 21 nt, Artificial
  Synthetic
caaauucuccuuuaaagugua

SEQ ID NO: 3077 - RNA, 21 nt, Artificial
  Synthetic
aauucuccuuuaaaguguuua

SEQ ID NO: 3078 - RNA, 21 nt, Artificial
  Synthetic
uucuccuuuaaaguguuucua

SEQ ID NO: 3079 - RNA, 21 nt, Artificial
  Synthetic
ucuccuuuaaaguguuucuua

SEQ ID NO: 3080 - RNA, 21 nt, Artificial
  Synthetic
cuccuuuaaaguguuucuuca

SEQ ID NO: 3081 - RNA, 21 nt, Artificial
  Synthetic
uccuuuaaaguguuucuucca

SEQ ID NO: 3082 - RNA, 21 nt, Artificial
  Synthetic
ccuuuaaaguguuucuuccca

SEQ ID NO: 3083 - RNA, 21 nt, Artificial
  Synthetic
uuuaaaguguuucuucccuua

SEQ ID NO: 3084 - RNA, 21 nt, Artificial
  Synthetic
aaguguuucuucccuuaauaa

SEQ ID NO: 3085 - RNA, 21 nt, Artificial
  Synthetic
aguguuucuucccuuaauaua

SEQ ID NO: 3086 - RNA, 21 nt, Artificial
  Synthetic
guguuucuucccuuaauauua

SEQ ID NO: 3087 - RNA, 21 nt, Artificial
  Synthetic
guuucuucccuuaauauuuaa

SEQ ID NO: 3088 - RNA, 21 nt, Artificial
  Synthetic
uucuucccuuaauauuuauca

SEQ ID NO: 3089 - RNA, 21 nt, Artificial
  Synthetic
cuucccuuaauauuuaucuga

SEQ ID NO: 3090 - RNA, 21 nt, Artificial
  Synthetic
cuuacauucucccaaguuaua

SEQ ID NO: 3091 - RNA, 21 nt, Artificial
  Synthetic
uuacauucucccaaguuauua

SEQ ID NO: 3092 - RNA, 21 nt, Artificial
  Synthetic
uacauucucccaaguuauuca

SEQ ID NO: 3093 - RNA, 21 nt, Artificial
  Synthetic
acauucucccaaguuauucaa

SEQ ID NO: 3094 - RNA, 21 nt, Artificial
  Synthetic
cauucucccaaguuauucaga

SEQ ID NO: 3095 - RNA, 21 nt, Artificial
  Synthetic
auucucccaaguuauucagca

SEQ ID NO: 3096 - RNA, 21 nt, Artificial
  Synthetic
aaguuauucagccucauauga

SEQ ID NO: 3097 - RNA, 21 nt, Artificial
  Synthetic
aguuauucagccucauaugaa

SEQ ID NO: 3098 - RNA, 21 nt, Artificial
  Synthetic
guuauucagccucauaugaca

SEQ ID NO: 3099 - RNA, 21 nt, Artificial
  Synthetic
acaguucagagugcacuuuga

SEQ ID NO: 3100 - RNA, 21 nt, Artificial
  Synthetic
caguucagagugcacuuugga

SEQ ID NO: 3101 - RNA, 21 nt, Artificial
  Synthetic
guucagagugcacuuuggcaa

SEQ ID NO: 3102 - RNA, 21 nt, Artificial
  Synthetic
ugcacuuuggcacacaauuga

SEQ ID NO: 3103 - RNA, 21 nt, Artificial
  Synthetic
aacagaacaaucuaaugugua

SEQ ID NO: 3104 - RNA, 21 nt, Artificial
  Synthetic
acagaacaaucuaauguguga

SEQ ID NO: 3105 - RNA, 21 nt, Artificial
  Synthetic
cagaacaaucuaaugugugga

SEQ ID NO: 3106 - RNA, 21 nt, Artificial
  Synthetic
agaacaaucuaauguguggua

SEQ ID NO: 3107 - RNA, 21 nt, Artificial
  Synthetic
acaaucuaaugugugguuuga

SEQ ID NO: 3108 - RNA, 21 nt, Artificial
  Synthetic
caaucuaaugugugguuugga

SEQ ID NO: 3109 - RNA, 21 nt, Artificial
  Synthetic
aaucuaaugugugguuuggua

SEQ ID NO: 3110 - RNA, 21 nt, Artificial
  Synthetic
aucuaaugugugguuugguaa

SEQ ID NO: 3111 - RNA, 21 nt, Artificial
  Synthetic
ucuaaugugugguuugguaua

SEQ ID NO: 3112 - RNA, 21 nt, Artificial
  Synthetic
uaaugugugguuugguauuca

SEQ ID NO: 3113 - RNA, 21 nt, Artificial
  Synthetic
aaugugugguuugguauucca

SEQ ID NO: 3114 - RNA, 21 nt, Artificial
  Synthetic
augugugguuugguauuccaa

SEQ ID NO: 3115 - RNA, 21 nt, Artificial
  Synthetic
gugugguuugguauuccaaga

SEQ ID NO: 3116 - RNA, 21 nt, Artificial
  Synthetic
gugugguguaaaggaauucaa

SEQ ID NO: 3117 - RNA, 21 nt, Artificial
  Synthetic
gugguguaaaggaauucauua

SEQ ID NO: 3118 - RNA, 21 nt, Artificial
  Synthetic
agccauggauguauucaugaa

SEQ ID NO: 3119 - RNA, 21 nt, Artificial
  Synthetic
uggauguauucaugaaaggaa

SEQ ID NO: 3120 - RNA, 21 nt, Artificial
  Synthetic
auucaugaaaggacuuucaaa

SEQ ID NO: 3121 - RNA, 21 nt, Artificial
  Synthetic
augaaaggacuuucaaaggca

SEQ ID NO: 3122 - RNA, 21 nt, Artificial
  Synthetic
ugaaaggacuuucaaaggcca

SEQ ID NO: 3123 - RNA, 21 nt, Artificial
  Synthetic
ggguguucucuauguaggcua

SEQ ID NO: 3124 - RNA, 21 nt, Artificial
  Synthetic
ggcugagaagaccaaagagca

SEQ ID NO: 3125 - RNA, 21 nt, Artificial
  Synthetic
gaagaccaaagagcaagugaa

SEQ ID NO: 3126 - RNA, 21 nt, Artificial
  Synthetic
ccugacaaugaggcuuaugaa

SEQ ID NO: 3127 - RNA, 21 nt, Artificial
  Synthetic
caaugaggcuuaugaaaugca

SEQ ID NO: 3128 - RNA, 21 nt, Artificial
  Synthetic
aaugaggcuuaugaaaugcca

SEQ ID NO: 3129 - RNA, 21 nt, Artificial
  Synthetic
ugaaaugccuucugaggaaga

SEQ ID NO: 3130 - RNA, 21 nt, Artificial
  Synthetic
aaggguaucaagacuacgaaa

SEQ ID NO: 3131 - RNA, 21 nt, Artificial
  Synthetic
aggguaucaagacuacgaaca

SEQ ID NO: 3132 - RNA, 21 nt, Artificial
  Synthetic
accugaagccuaagaaauaua

SEQ ID NO: 3133 - RNA, 21 nt, Artificial
  Synthetic
cugaagccuaagaaauaucua

SEQ ID NO: 3134 - RNA, 21 nt, Artificial
  Synthetic
gaagccuaagaaauaucuuua

SEQ ID NO: 3135 - RNA, 21 nt, Artificial
  Synthetic
cuaagaaauaucuuugcucca

SEQ ID NO: 3136 - RNA, 21 nt, Artificial
  Synthetic
auaucuuugcucccaguuuca

SEQ ID NO: 3137 - RNA, 21 nt, Artificial
  Synthetic
uugcucccaguuucuugagaa

SEQ ID NO: 3138 - RNA, 21 nt, Artificial
  Synthetic
ugcucccaguuucuugagaua

SEQ ID NO: 3139 - RNA, 21 nt, Artificial
  Synthetic
cuguacaagugcucaguucca

SEQ ID NO: 3140 - RNA, 21 nt, Artificial
  Synthetic
guacaagugcucaguuccaaa

SEQ ID NO: 3141 - RNA, 21 nt, Artificial
  Synthetic
ccagucaugacauuucucaaa

SEQ ID NO: 3142 - RNA, 21 nt, Artificial
  Synthetic
ucuuccaucagcagugauuga

SEQ ID NO: 3143 - RNA, 21 nt, Artificial
  Synthetic
uuccaucagcagugauugaaa

SEQ ID NO: 3144 - RNA, 21 nt, Artificial
  Synthetic
ccaucagcagugauugaagua

SEQ ID NO: 3145 - RNA, 21 nt, Artificial
  Synthetic
aucagcagugauugaaguaua

SEQ ID NO: 3146 - RNA, 21 nt, Artificial
  Synthetic
gcagugauugaaguaucugua

SEQ ID NO: 3147 - RNA, 21 nt, Artificial
  Synthetic
cuucccuuucacugaagugaa

SEQ ID NO: 3148 - RNA, 21 nt, Artificial
  Synthetic
uucacugaagugaauacauga

SEQ ID NO: 3149 - RNA, 21 nt, Artificial
  Synthetic
ucacugaagugaauacaugga

SEQ ID NO: 3150 - RNA, 21 nt, Artificial
  Synthetic
acugaagugaauacaugguaa

SEQ ID NO: 3151 - RNA, 21 nt, Artificial
  Synthetic
cuaccacuuauuucuaaauca

SEQ ID NO: 3152 - RNA, 21 nt, Artificial
  Synthetic
uaccacuuauuucuaaaucca

SEQ ID NO: 3153 - RNA, 21 nt, Artificial
  Synthetic
ccacuuauuucuaaauccuca

SEQ ID NO: 3154 - RNA, 21 nt, Artificial
  Synthetic
aguuguuagugauuugcuaua

SEQ ID NO: 3155 - RNA, 21 nt, Artificial
  Synthetic
auacugucuaagaauaaugaa

SEQ ID NO: 3156 - RNA, 21 nt, Artificial
  Synthetic
auaugugagcaugaaacuaua

SEQ ID NO: 3157 - RNA, 21 nt, Artificial
  Synthetic
uaugugagcaugaaacuauga

SEQ ID NO: 3158 - RNA, 21 nt, Artificial
  Synthetic
ugugagcaugaaacuaugcaa

SEQ ID NO: 3159 - RNA, 21 nt, Artificial
  Synthetic
aacuaugcaccuauaaauaca

SEQ ID NO: 3160 - RNA, 21 nt, Artificial
  Synthetic
cuaugcaccuauaaauacuaa

SEQ ID NO: 3161 - RNA, 21 nt, Artificial
  Synthetic
uguuuguauauaaauggugaa

SEQ ID NO: 3162 - RNA, 21 nt, Artificial
  Synthetic
cccaucucacuuuaauaauaa

SEQ ID NO: 3163 - RNA, 21 nt, Artificial
  Synthetic
auauuagcacauucaaggcua

SEQ ID NO: 3164 - RNA, 21 nt, Artificial
  Synthetic
cuuuaaauguugccaaauaua

SEQ ID NO: 3165 - RNA, 21 nt, Artificial
  Synthetic
aaauauaugaauucuaggaua

SEQ ID NO: 3166 - RNA, 21 nt, Artificial
  Synthetic
ucuuucagggaagaucuauua

SEQ ID NO: 3167 - RNA, 21 nt, Artificial
  Synthetic
gaauauucuagacaugcuaga

SEQ ID NO: 3168 - RNA, 21 nt, Artificial
  Synthetic
uauucuagacaugcuagcaga

SEQ ID NO: 3169 - RNA, 21 nt, Artificial
  Synthetic
cuagacaugcuagcaguuuaa

SEQ ID NO: 3170 - RNA, 21 nt, Artificial
  Synthetic
ugcuagcaguuuauauguaua

SEQ ID NO: 3171 - RNA, 21 nt, Artificial
  Synthetic
gcuagcaguuuauauguauua

SEQ ID NO: 3172 - RNA, 21 nt, Artificial
  Synthetic
caguuuauauguauucaugaa

SEQ ID NO: 3173 - RNA, 21 nt, Artificial
  Synthetic
guauucaugaguaaugugaua

SEQ ID NO: 3174 - RNA, 21 nt, Artificial
  Synthetic
gaaugagugacuauaaggaua

SEQ ID NO: 3175 - RNA, 21 nt, Artificial
  Synthetic
gagugacuauaaggaugguua

SEQ ID NO: 3176 - RNA, 21 nt, Artificial
  Synthetic
gacuauaaggaugguuaccaa

SEQ ID NO: 3177 - RNA, 21 nt, Artificial
  Synthetic
uaaggaugguuaccauagaaa

SEQ ID NO: 3178 - RNA, 21 nt, Artificial
  Synthetic
gaugguuaccauagaaacuua

SEQ ID NO: 3179 - RNA, 21 nt, Artificial
  Synthetic
augguuaccauagaaacuuca

SEQ ID NO: 3180 - RNA, 21 nt, Artificial
  Synthetic
guuaccauagaaacuuccuua

SEQ ID NO: 3181 - RNA, 21 nt, Artificial
  Synthetic
uuaccauagaaacuuccuuua

SEQ ID NO: 3182 - RNA, 21 nt, Artificial
  Synthetic
cuacuacagagugcuaagcua

SEQ ID NO: 3183 - RNA, 21 nt, Artificial
  Synthetic
ugcuaagcugcaugugucaua

SEQ ID NO: 3184 - RNA, 21 nt, Artificial
  Synthetic
ugcaugugucaucuuacacua

SEQ ID NO: 3185 - RNA, 21 nt, Artificial
  Synthetic
uagagagaaaugguaaguuua

SEQ ID NO: 3186 - RNA, 21 nt, Artificial
  Synthetic
agagagaaaugguaaguuuca

SEQ ID NO: 3187 - RNA, 21 nt, Artificial
  Synthetic
uugaacaguauauuucaggaa

SEQ ID NO: 3188 - RNA, 21 nt, Artificial
  Synthetic
caguauauuucaggaagguua

SEQ ID NO: 3189 - RNA, 21 nt, Artificial
  Synthetic
ggaaaguugugaccaugaaua

SEQ ID NO: 3190 - RNA, 21 nt, Artificial
  Synthetic
auuuauguggauacaaauuca

SEQ ID NO: 3191 - RNA, 21 nt, Artificial
  Synthetic
uauguggauacaaauucucca

SEQ ID NO: 3192 - RNA, 21 nt, Artificial
  Synthetic
aaauucuccuuuaaaguguua

SEQ ID NO: 3193 - RNA, 21 nt, Artificial
  Synthetic
auucuccuuuaaaguguuuca

SEQ ID NO: 3194 - RNA, 21 nt, Artificial
  Synthetic
uccuuuaaaguguuucuucca

SEQ ID NO: 3195 - RNA, 21 nt, Artificial
  Synthetic
cuuuaaaguguuucuucccua

SEQ ID NO: 3196 - RNA, 21 nt, Artificial
  Synthetic
uuuaaaguguuucuucccuua

SEQ ID NO: 3197 - RNA, 21 nt, Artificial
  Synthetic
cuuacauucucccaaguuaua

SEQ ID NO: 3198 - RNA, 21 nt, Artificial
  Synthetic
auucucccaaguuauucagca

SEQ ID NO: 3199 - RNA, 21 nt, Artificial
  Synthetic
uuauucagccucauaugacua

SEQ ID NO: 3200 - RNA, 21 nt, Artificial
  Synthetic
agaacaaucuaauguguggua

SEQ ID NO: 3201 - RNA, 21 nt, Artificial
  Synthetic
aacaaucuaaugugugguuua

SEQ ID NO: 3202 - RNA, 21 nt, Artificial
  Synthetic
aaugugugguuugguauucca

SEQ ID NO: 3203 - RNA, 21 nt, Artificial
  Synthetic
augugugguuugguauuccaa

SEQ ID NO: 3204 - RNA, 21 nt, Artificial
  Synthetic
gugugguuugguauuccaaga

SEQ ID NO: 3205 - RNA, 21 nt, Artificial
  Synthetic
uggccauucgacgacagugua

SEQ ID NO: 3206 - RNA, 21 nt, Artificial
  Synthetic
gacgacagugugguguaaaga

SEQ ID NO: 3207 - RNA, 21 nt, Artificial
  Synthetic
gccauggauguauucaugaaa

SEQ ID NO: 3208 - RNA, 21 nt, Artificial
  Synthetic
auggauguauucaugaaagga

SEQ ID NO: 3209 - RNA, 21 nt, Artificial
  Synthetic
aggguguucucuauguaggca

SEQ ID NO: 3210 - RNA, 21 nt, Artificial
  Synthetic
caaagagcaagugacaaauga

SEQ ID NO: 3211 - RNA, 21 nt, Artificial
  Synthetic
agcaagugacaaauguuggaa

SEQ ID NO: 3212 - RNA, 21 nt, Artificial
  Synthetic
acaaugaggcuuaugaaauga

SEQ ID NO: 3213 - RNA, 21 nt, Artificial
  Synthetic
caguuucuugagaucugcuga

SEQ ID NO: 3214 - RNA, 21 nt, Artificial
  Synthetic
uguacaagugcucaguuccaa

SEQ ID NO: 3215 - RNA, 21 nt, Artificial
  Synthetic
caagugcucaguuccaaugua

SEQ ID NO: 3216 - RNA, 21 nt, Artificial
  Synthetic
gucaugacauuucucaaagua

SEQ ID NO: 3217 - RNA, 21 nt, Artificial
  Synthetic
ucgaagucuuccaucagcaga

SEQ ID NO: 3218 - RNA, 21 nt, Artificial
  Synthetic
cagcagugauugaaguaucua

SEQ ID NO: 3219 - RNA, 21 nt, Artificial
  Synthetic
gcuucccuuucacugaaguga

SEQ ID NO: 3220 - RNA, 21 nt, Artificial
  Synthetic
cacugaagugaauacauggua

SEQ ID NO: 3221 - RNA, 21 nt, Artificial
  Synthetic
ugaagugaauacaugguagca

SEQ ID NO: 3222 - RNA, 21 nt, Artificial
  Synthetic
cuaagugacuaccacuuauua

SEQ ID NO: 3223 - RNA, 21 nt, Artificial
  Synthetic
acuaccacuuauuucuaaaua

SEQ ID NO: 3224 - RNA, 21 nt, Artificial
  Synthetic
augugagcaugaaacuaugca

SEQ ID NO: 3225 - RNA, 21 nt, Artificial
  Synthetic
acacugccagaaguguguuua

SEQ ID NO: 3226 - RNA, 21 nt, Artificial
  Synthetic
caaauauaugaauucuaggaa

SEQ ID NO: 3227 - RNA, 21 nt, Artificial
  Synthetic
gucacuaguagaaaguauaaa

SEQ ID NO: 3228 - RNA, 21 nt, Artificial
  Synthetic
caagacagaauauucuagaca

SEQ ID NO: 3229 - RNA, 21 nt, Artificial
  Synthetic
cuagcaguuuauauguauuca

SEQ ID NO: 3230 - RNA, 21 nt, Artificial
  Synthetic
ugacuauaaggaugguuacca

SEQ ID NO: 3231 - RNA, 21 nt, Artificial
  Synthetic
gguuaccauagaaacuuccua

SEQ ID NO: 3232 - RNA, 21 nt, Artificial
  Synthetic
uaagcugcaugugucaucuua

SEQ ID NO: 3233 - RNA, 21 nt, Artificial
  Synthetic
gcugcaugugucaucuuacaa

SEQ ID NO: 3234 - RNA, 21 nt, Artificial
  Synthetic
acaguauauuucaggaaggua

SEQ ID NO: 3235 - RNA, 21 nt, Artificial
  Synthetic
ucuaccuaaagcagcauauua

SEQ ID NO: 3236 - RNA, 21 nt, Artificial
  Synthetic
uguggauacaaauucuccuua

SEQ ID NO: 3237 - RNA, 21 nt, Artificial
  Synthetic
ggauacaaauucuccuuuaaa

SEQ ID NO: 3238 - RNA, 21 nt, Artificial
  Synthetic
aauucuccuuuaaaguguuua

SEQ ID NO: 3239 - RNA, 21 nt, Artificial
  Synthetic
uucuccuuuaaaguguuucua

SEQ ID NO: 3240 - RNA, 21 nt, Artificial
  Synthetic
aaaguguuucuucccuuaaua

SEQ ID NO: 3241 - RNA, 21 nt, Artificial
  Synthetic
ugcacuuuggcacacaauuga

SEQ ID NO: 3242 - RNA, 21 nt, Artificial
  Synthetic
gaacaaucuaaugugugguua

SEQ ID NO: 3243 - RNA, 21 nt, Artificial
  Synthetic
cuaaugugugguuugguauua

SEQ ID NO: 3244 - RNA, 21 nt, Artificial
  Synthetic
uaaugugugguuugguauuca

SEQ ID NO: 3245 - DNA, 23 bp, Artificial
  Synthetic
ucuutacaccacacugucgucga

SEQ ID NO: 3246 - DNA, 23 bp, Artificial
  Synthetic
uccutuacaccacacugucgucg

SEQ ID NO: 3247 - DNA, 23 bp, Artificial
  Synthetic
utcctutacaccacacugucguc

SEQ ID NO: 3248 - DNA, 23 bp, Artificial
  Synthetic
uaugaatuccutuacaccacacu

SEQ ID NO: 3249 - RNA, 23 nt, Artificial
  Synthetic
ucuaaugaauuccuuuacaccac

SEQ ID NO: 3250 - DNA, 23 bp, Artificial
  Synthetic
utgaauacauccauggcuaauga

SEQ ID NO: 3251 - DNA, 23 bp, Artificial
  Synthetic
uaugaatacauccauggcuaaug

SEQ ID NO: 3252 - DNA, 23 bp, Artificial
  Synthetic
uccutucaugaauacauccaugg

SEQ ID NO: 3253 - DNA, 23 bp, Artificial
  Synthetic
utugaaagucctuucaugaauac

SEQ ID NO: 3254 - DNA, 23 bp, Artificial
  Synthetic
ucuutgaaaguccuuucaugaau

SEQ ID NO: 3255 - DNA, 23 bp, Artificial
  Synthetic
uccutugaaagtccuuucaugaa

SEQ ID NO: 3256 - DNA, 23 bp, Artificial
  Synthetic
ugcctutgaaaguccuuucauga

SEQ ID NO: 3257 - DNA, 23 bp, Artificial
  Synthetic
ucuacatagagaacacccucuuu

SEQ ID NO: 3258 - RNA, 23 nt, Artificial
  Synthetic
uccuacauagagaacacccucuu

SEQ ID NO: 3259 - RNA, 23 nt, Artificial
  Synthetic
uagccuacauagagaacacccuc

SEQ ID NO: 3260 - DNA, 23 bp, Artificial
  Synthetic
ucuctutgguctucucagccacu

SEQ ID NO: 3261 - DNA, 23 bp, Artificial
  Synthetic
ugcucutuggucuucucagccac

SEQ ID NO: 3262 - DNA, 23 bp, Artificial
  Synthetic
utcacutgcuctuuggucuucuc

SEQ ID NO: 3263 - DNA, 23 bp, Artificial
  Synthetic
uaacautugucacuugcucuuug

SEQ ID NO: 3264 - DNA, 23 bp, Artificial
  Synthetic
ucaacatuugucacuugcucuuu

SEQ ID NO: 3265 - DNA, 23 bp, Artificial
  Synthetic
uccaacauuugtcacuugcucuu

SEQ ID NO: 3266 - DNA, 23 bp, Artificial
  Synthetic
utccaacauuugucacuugcucu

SEQ ID NO: 3267 - RNA, 23 nt, Artificial
  Synthetic
ucauaagccucauugucaggauc

SEQ ID NO: 3268 - DNA, 23 bp, Artificial
  Synthetic
utcataagccucauugucaggau

SEQ ID NO: 3269 - DNA, 23 bp, Artificial
  Synthetic
utucauaagcctcauugucagga

SEQ ID NO: 3270 - DNA, 23 bp, Artificial
  Synthetic
ugcatutcauaagccucauuguc

SEQ ID NO: 3271 - DNA, 23 bp, Artificial
  Synthetic
uggcautucauaagccucauugu

SEQ ID NO: 3272 - DNA, 23 bp, Artificial
  Synthetic
ucagaaggcautucauaagccuc

SEQ ID NO: 3273 - RNA, 23 nt, Artificial
  Synthetic
ucucagaaggcauuucauaagcc

SEQ ID NO: 3274 - RNA, 23 nt, Artificial
  Synthetic
uccucagaaggcauuucauaagc

SEQ ID NO: 3275 - DNA, 23 bp, Artificial
  Synthetic
utucguagucutgauacccuucc

SEQ ID NO: 3276 - DNA, 23 bp, Artificial
  Synthetic
uguucgtaguctugauacccuuc

SEQ ID NO: 3277 - DNA, 23 bp, Artificial
  Synthetic
ucaggutcguagucuugauaccc

SEQ ID NO: 3278 - DNA, 23 bp, Artificial
  Synthetic
uauatutcuuaggcuucagguuc

SEQ ID NO: 3279 - DNA, 23 bp, Artificial
  Synthetic
ugauautucuuaggcuucagguu

SEQ ID NO: 3280 - DNA, 23 bp, Artificial
  Synthetic
uagatatuucutaggcuucaggu

SEQ ID NO: 3281 - DNA, 23 bp, Artificial
  Synthetic
uaagauauuuctuaggcuucagg

SEQ ID NO: 3282 - DNA, 23 bp, Artificial
  Synthetic
uaaagatauuucuuaggcuucag

SEQ ID NO: 3283 - DNA, 23 bp, Artificial
  Synthetic
ucaaagauauutcuuaggcuuca

SEQ ID NO: 3284 - DNA, 23 bp, Artificial
  Synthetic
ugcaaagauautucuuaggcuuc

SEQ ID NO: 3285 - DNA, 23 bp, Artificial
  Synthetic
uagcaaagauatuucuuaggcuu

SEQ ID NO: 3286 - RNA, 23 nt, Artificial
  Synthetic
ugagcaaagauauuucuuaggcu

SEQ ID NO: 3287 - DNA, 23 bp, Artificial
  Synthetic
ugaaactgggagcaaagauauuu

SEQ ID NO: 3288 - RNA, 23 nt, Artificial
  Synthetic
uagaaacugggagcaaagauauu

SEQ ID NO: 3289 - RNA, 23 nt, Artificial
  Synthetic
uaagaaacugggagcaaagauau

SEQ ID NO: 3290 - RNA, 23 nt, Artificial
  Synthetic
ucaagaaacugggagcaaagaua

SEQ ID NO: 3291 - DNA, 23 bp, Artificial
  Synthetic
utcaagaaacugggagcaaagau

SEQ ID NO: 3292 - DNA, 23 bp, Artificial
  Synthetic
ucucaagaaactgggagcaaaga

SEQ ID NO: 3293 - RNA, 23 nt, Artificial
  Synthetic
ucagaucucaagaaacugggagc

SEQ ID NO: 3294 - RNA, 23 nt, Artificial
  Synthetic
ucagcagaucucaagaaacuggg

SEQ ID NO: 3295 - DNA, 23 bp, Artificial
  Synthetic
ucacautggaacugagcacuugu

SEQ ID NO: 3296 - DNA, 23 bp, Artificial
  Synthetic
ugcacatuggaacugagcacuug

SEQ ID NO: 3297 - DNA, 23 bp, Artificial
  Synthetic
uagaaatgucatgacugggcaca

SEQ ID NO: 3298 - RNA, 23 nt, Artificial
  Synthetic
ugagaaaugucaugacugggcac

SEQ ID NO: 3299 - DNA, 23 bp, Artificial
  Synthetic
utgagaaaugucaugacugggca

SEQ ID NO: 3300 - DNA, 23 bp, Artificial
  Synthetic
utugagaaaugtcaugacugggc

SEQ ID NO: 3301 - DNA, 23 bp, Artificial
  Synthetic
uacutugagaaaugucaugacug

SEQ ID NO: 3302 - DNA, 23 bp, Artificial
  Synthetic
uaaacutugagaaaugucaugac

SEQ ID NO: 3303 - RNA, 23 nt, Artificial
  Synthetic
ucugcugauggaagacuucgaga

SEQ ID NO: 3304 - DNA, 23 bp, Artificial
  Synthetic
ucaatcacugctgauggaagacu

SEQ ID NO: 3305 - DNA, 23 bp, Artificial
  Synthetic
ucuucaaucactgcugauggaag

SEQ ID NO: 3306 - DNA, 23 bp, Artificial
  Synthetic
uacutcaaucacugcugauggaa

SEQ ID NO: 3307 - DNA, 23 bp, Artificial
  Synthetic
uauacutcaaucacugcugaugg

SEQ ID NO: 3308 - RNA, 23 nt, Artificial
  Synthetic
ucagauacuucaaucacugcuga

SEQ ID NO: 3309 - DNA, 23 bp, Artificial
  Synthetic
uacagatacuucaaucacugcug

SEQ ID NO: 3310 - DNA, 23 bp, Artificial
  Synthetic
ucagguacagatacuucaaucac

SEQ ID NO: 3311 - RNA, 23 nt, Artificial
  Synthetic
uagugaaagggaagcaccgaaau

SEQ ID NO: 3312 - DNA, 23 bp, Artificial
  Synthetic
ucagtgaaagggaagcaccgaaa

SEQ ID NO: 3313 - DNA, 23 bp, Artificial
  Synthetic
utcacutcagugaaagggaagca

SEQ ID NO: 3314 - DNA, 23 bp, Artificial
  Synthetic
uaugtatucactucagugaaagg

SEQ ID NO: 3315 - RNA, 23 nt, Artificial
  Synthetic
ucauguauucacuucagugaaag

SEQ ID NO: 3316 - RNA, 23 nt, Artificial
  Synthetic
uaccauguauucacuucagugaa

SEQ ID NO: 3317 - DNA, 23 bp, Artificial
  Synthetic
utaccatguautcacuucaguga

SEQ ID NO: 3318 - DNA, 23 bp, Artificial
  Synthetic
ucuaccauguatucacuucagug

SEQ ID NO: 3319 - RNA, 23 nt, Artificial
  Synthetic
uaauaagugguagucacuuaggu

SEQ ID NO: 3320 - DNA, 23 bp, Artificial
  Synthetic
uaaataaguggtagucacuuagg

SEQ ID NO: 3321 - RNA, 23 nt, Artificial
  Synthetic
ugaaauaagugguagucacuuag

SEQ ID NO: 3322 - DNA, 23 bp, Artificial
  Synthetic
uagaaataagugguagucacuua

SEQ ID NO: 3323 - DNA, 23 bp, Artificial
  Synthetic
utagaaauaagtgguagucacuu

SEQ ID NO: 3324 - DNA, 23 bp, Artificial
  Synthetic
utuagaaauaagugguagucacu

SEQ ID NO: 3325 - DNA, 23 bp, Artificial
  Synthetic
uauutagaaauaagugguaguca

SEQ ID NO: 3326 - DNA, 23 bp, Artificial
  Synthetic
ugautuagaaataagugguaguc

SEQ ID NO: 3327 - DNA, 23 bp, Artificial
  Synthetic
uaggautuagaaauaagugguag

SEQ ID NO: 3328 - DNA, 23 bp, Artificial
  Synthetic
ucaacutcugaacaacagcaaca

SEQ ID NO: 3329 - DNA, 23 bp, Artificial
  Synthetic
uacaactucugaacaacagcaac

SEQ ID NO: 3330 - RNA, 23 nt, Artificial
  Synthetic
uaacaacuucugaacaacagcaa

SEQ ID NO: 3331 - DNA, 23 bp, Artificial
  Synthetic
utaacaacuuctgaacaacagca

SEQ ID NO: 3332 - RNA, 23 nt, Artificial
  Synthetic
ucuaacaacuucugaacaacagc

SEQ ID NO: 3333 - DNA, 23 bp, Artificial
  Synthetic
uacuaacaacutcugaacaacag

SEQ ID NO: 3334 - DNA, 23 bp, Artificial
  Synthetic
ucactaacaactucugaacaaca

SEQ ID NO: 3335 - DNA, 23 bp, Artificial
  Synthetic
utcacuaacaacuucugaacaac

SEQ ID NO: 3336 - RNA, 23 nt, Artificial
  Synthetic
ucaaaucacuaacaacuucugaa

SEQ ID NO: 3337 - DNA, 23 bp, Artificial
  Synthetic
uagcaaaucactaacaacuucug

SEQ ID NO: 3338 - DNA, 23 bp, Artificial
  Synthetic
utagcaaaucacuaacaacuucu

SEQ ID NO: 3339 - RNA, 23 nt, Artificial
  Synthetic
uauagcaaaucacuaacaacuuc

SEQ ID NO: 3340 - DNA, 23 bp, Artificial
  Synthetic
ucautatucuuagacaguaucau

SEQ ID NO: 3341 - DNA, 23 bp, Artificial
  Synthetic
utcatuauucutagacaguauca

SEQ ID NO: 3342 - DNA, 23 bp, Artificial
  Synthetic
utaacaaauuucacaauacguca

SEQ ID NO: 3343 - DNA, 23 bp, Artificial
  Synthetic
ucauagtuucatgcucacauauu

SEQ ID NO: 3344 - DNA, 23 bp, Artificial
  Synthetic
utgcauaguuucaugcucacaua

SEQ ID NO: 3345 - DNA, 23 bp, Artificial
  Synthetic
uauutataggugcauaguuucau

SEQ ID NO: 3346 - DNA, 23 bp, Artificial
  Synthetic
utautuauaggtgcauaguuuca

SEQ ID NO: 3347 - DNA, 23 bp, Artificial
  Synthetic
uguatutauaggugcauaguuuc

SEQ ID NO: 3348 - DNA, 23 bp, Artificial
  Synthetic
uaguautuauaggugcauaguuu

SEQ ID NO: 3349 - DNA, 23 bp, Artificial
  Synthetic
utagtatuuauaggugcauaguu

SEQ ID NO: 3350 - DNA, 23 bp, Artificial
  Synthetic
ucautuauauacaaacacaagug

SEQ ID NO: 3351 - DNA, 23 bp, Artificial
  Synthetic
uccatutauauacaaacacaagu

SEQ ID NO: 3352 - DNA, 23 bp, Artificial
  Synthetic
uaccautuauatacaaacacaag

SEQ ID NO: 3353 - DNA, 23 bp, Artificial
  Synthetic
ucaccatuuauauacaaacacaa

SEQ ID NO: 3354 - DNA, 23 bp, Artificial
  Synthetic
utcaccauuuatauacaaacaca

SEQ ID NO: 3355 - DNA, 23 bp, Artificial
  Synthetic
utautaaagugagaugggauaaa

SEQ ID NO: 3356 - DNA, 23 bp, Artificial
  Synthetic
utuatuaaagugagaugggauaa

SEQ ID NO: 3357 - DNA, 23 bp, Artificial
  Synthetic
uauuautaaagtgagaugggaua

SEQ ID NO: 3358 - DNA, 23 bp, Artificial
  Synthetic
utautatuaaagugagaugggau

SEQ ID NO: 3359 - DNA, 23 bp, Artificial
  Synthetic
utugaatgugctaauaugugcua

SEQ ID NO: 3360 - DNA, 23 bp, Artificial
  Synthetic
uagccutgaaugugcuaauaugu

SEQ ID NO: 3361 - DNA, 23 bp, Artificial
  Synthetic
uguutaaaggcauuuccuguaaa

SEQ ID NO: 3362 - DNA, 23 bp, Artificial
  Synthetic
utgutuaaaggcauuuccuguaa

SEQ ID NO: 3363 - DNA, 23 bp, Artificial
  Synthetic
uauatutggcaacauuuaaagga

SEQ ID NO: 3364 - DNA, 23 bp, Artificial
  Synthetic
utauautuggcaacauuuaaagg

SEQ ID NO: 3365 - DNA, 23 bp, Artificial
  Synthetic
uagaautcauatauuuggcaaca

SEQ ID NO: 3366 - DNA, 23 bp, Artificial
  Synthetic
utagaatucauauauuuggcaac

SEQ ID NO: 3367 - DNA, 23 bp, Artificial
  Synthetic
ucuagaauucatauauuuggcaa

SEQ ID NO: 3368 - RNA, 23 nt, Artificial
  Synthetic
uccuagaauucauauauuuggca

SEQ ID NO: 3369 - DNA, 23 bp, Artificial
  Synthetic
utcctagaauucauauauuuggc

SEQ ID NO: 3370 - DNA, 23 bp, Artificial
  Synthetic
uauccuagaautcauauauuugg

SEQ ID NO: 3371 - DNA, 23 bp, Artificial
  Synthetic
utuaauagauctucccugaaaga

SEQ ID NO: 3372 - DNA, 23 bp, Artificial
  Synthetic
uguuaatagaucuucccugaaag

SEQ ID NO: 3373 - DNA, 23 bp, Artificial
  Synthetic
uagutaauagatcuucccugaaa

SEQ ID NO: 3374 - DNA, 23 bp, Artificial
  Synthetic
ugagtuaauagaucuucccugaa

SEQ ID NO: 3375 - RNA, 23 nt, Artificial
  Synthetic
uauuauacuuucuacuagugacu

SEQ ID NO: 3376 - DNA, 23 bp, Artificial
  Synthetic
ugaaautauactuucuacuagug

SEQ ID NO: 3377 - RNA, 23 nt, Artificial
  Synthetic
ucuagaauauucugucuugaaau

SEQ ID NO: 3378 - DNA, 23 bp, Artificial
  Synthetic
utcuagaauautcugucuugaaa

SEQ ID NO: 3379 - RNA, 23 nt, Artificial
  Synthetic
ucugcuagcaugucuagaauauu

SEQ ID NO: 3380 - RNA, 23 nt, Artificial
  Synthetic
uauaaacugcuagcaugucuaga

SEQ ID NO: 3381 - DNA, 23 bp, Artificial
  Synthetic
utauaaacugctagcaugucuag

SEQ ID NO: 3382 - DNA, 23 bp, Artificial
  Synthetic
uauataaacugcuagcaugucua

SEQ ID NO: 3383 - RNA, 23 nt, Artificial
  Synthetic
ucauauaaacugcuagcaugucu

SEQ ID NO: 3384 - DNA, 23 bp, Artificial
  Synthetic
uacatataaactgcuagcauguc

SEQ ID NO: 3385 - DNA, 23 bp, Artificial
  Synthetic
utacauauaaacugcuagcaugu

SEQ ID NO: 3386 - DNA, 23 bp, Artificial
  Synthetic
uauacatauaaacugcuagcaug

SEQ ID NO: 3387 - RNA, 23 nt, Artificial
  Synthetic
uaauacauauaaacugcuagcau

SEQ ID NO: 3388 - DNA, 23 bp, Artificial
  Synthetic
utgaauacauataaacugcuagc

SEQ ID NO: 3389 - DNA, 23 bp, Artificial
  Synthetic
uaugaatacauauaaacugcuag

SEQ ID NO: 3390 - DNA, 23 bp, Artificial
  Synthetic
ucaugaauacatauaaacugcua

SEQ ID NO: 3391 - DNA, 23 bp, Artificial
  Synthetic
uccaauauauatcacauuacuca

SEQ ID NO: 3392 - RNA, 23 nt, Artificial
  Synthetic
ucuuauagucacucauuccuccu

SEQ ID NO: 3393 - DNA, 23 bp, Artificial
  Synthetic
uccutatagucacucauuccucc

SEQ ID NO: 3394 - DNA, 23 bp, Artificial
  Synthetic
utcctuauagucacucauuccuc

SEQ ID NO: 3395 - DNA, 23 bp, Artificial
  Synthetic
uauccutauagtcacucauuccu

SEQ ID NO: 3396 - DNA, 23 bp, Artificial
  Synthetic
ucaucctuauagucacucauucc

SEQ ID NO: 3397 - DNA, 23 bp, Artificial
  Synthetic
uaaccatccuuauagucacucau

SEQ ID NO: 3398 - RNA, 23 nt, Artificial
  Synthetic
ugguaaccauccuuauagucacu

SEQ ID NO: 3399 - DNA, 23 bp, Artificial
  Synthetic
utggtaaccauccuuauagucac

SEQ ID NO: 3400 - DNA, 23 bp, Artificial
  Synthetic
uaugguaaccatccuuauaguca

SEQ ID NO: 3401 - DNA, 23 bp, Artificial
  Synthetic
uaagtutcuaugguaaccauccu

SEQ ID NO: 3402 - RNA, 23 nt, Artificial
  Synthetic
uaaggaaguuucuaugguaacca

SEQ ID NO: 3403 - DNA, 23 bp, Artificial
  Synthetic
uaaaggaaguutcuaugguaacc

SEQ ID NO: 3404 - DNA, 23 bp, Artificial
  Synthetic
ucagcutagcacucuguaguagu

SEQ ID NO: 3405 - DNA, 23 bp, Artificial
  Synthetic
ucacaugcagctuagcacucugu

SEQ ID NO: 3406 - DNA, 23 bp, Artificial
  Synthetic
uacacatgcagcuuagcacucug

SEQ ID NO: 3407 - RNA, 23 nt, Artificial
  Synthetic
uaagaugacacaugcagcuuagc

SEQ ID NO: 3408 - DNA, 23 bp, Artificial
  Synthetic
utguaagaugacacaugcagcuu

SEQ ID NO: 3409 - DNA, 23 bp, Artificial
  Synthetic
ugugtaagaugacacaugcagcu

SEQ ID NO: 3410 - RNA, 23 nt, Artificial
  Synthetic
uaguguaagaugacacaugcagc

SEQ ID NO: 3411 - DNA, 23 bp, Artificial
  Synthetic
uaaacutaccatuucucucuagu

SEQ ID NO: 3412 - RNA, 23 nt, Artificial
  Synthetic
uagaaacuuaccauuucucucua

SEQ ID NO: 3413 - RNA, 23 nt, Artificial
  Synthetic
uaagaaacuuaccauuucucucu

SEQ ID NO: 3414 - RNA, 23 nt, Artificial
  Synthetic
ucaagaaacuuaccauuucucuc

SEQ ID NO: 3415 - DNA, 23 bp, Artificial
  Synthetic
uacaagaaacutaccauuucucu

SEQ ID NO: 3416 - DNA, 23 bp, Artificial
  Synthetic
uaacaagaaactuaccauuucuc

SEQ ID NO: 3417 - RNA, 23 nt, Artificial
  Synthetic
uaaacaagaaacuuaccauuucu

SEQ ID NO: 3418 - RNA, 23 nt, Artificial
  Synthetic
ucugaaauauacuguucaauaac

SEQ ID NO: 3419 - RNA, 23 nt, Artificial
  Synthetic
uccugaaauauacuguucaauaa

SEQ ID NO: 3420 - DNA, 23 bp, Artificial
  Synthetic
uaaccutccugaaauauacuguu

SEQ ID NO: 3421 - DNA, 23 bp, Artificial
  Synthetic
uaaatatgcugcuuuagguagau

SEQ ID NO: 3422 - DNA, 23 bp, Artificial
  Synthetic
utaaautcauggucacaacuuuc

SEQ ID NO: 3423 - DNA, 23 bp, Artificial
  Synthetic
ugaatutguauccacauaaaucc

SEQ ID NO: 3424 - DNA, 23 bp, Artificial
  Synthetic
uagaautuguatccacauaaauc

SEQ ID NO: 3425 - DNA, 23 bp, Artificial
  Synthetic
ugagaatuuguauccacauaaau

SEQ ID NO: 3426 - RNA, 23 nt, Artificial
  Synthetic
uaggagaauuuguauccacauaa

SEQ ID NO: 3427 - DNA, 23 bp, Artificial
  Synthetic
utuaaaggagaauuuguauccac

SEQ ID NO: 3428 - DNA, 23 bp, Artificial
  Synthetic
ucuutaaaggagaauuuguaucc

SEQ ID NO: 3429 - DNA, 23 bp, Artificial
  Synthetic
uacutuaaaggagaauuuguauc

SEQ ID NO: 3430 - DNA, 23 bp, Artificial
  Synthetic
ucactutaaaggagaauuuguau

SEQ ID NO: 3431 - DNA, 23 bp, Artificial
  Synthetic
uacacutuaaaggagaauuugua

SEQ ID NO: 3432 - RNA, 23 nt, Artificial
  Synthetic
uaaacacuuuaaaggagaauuug

SEQ ID NO: 3433 - DNA, 23 bp, Artificial
  Synthetic
uagaaacacuutaaaggagaauu

SEQ ID NO: 3434 - DNA, 23 bp, Artificial
  Synthetic
uaagaaacacutuaaaggagaau

SEQ ID NO: 3435 - DNA, 23 bp, Artificial
  Synthetic
ugaagaaacactuuaaaggagaa

SEQ ID NO: 3436 - RNA, 23 nt, Artificial
  Synthetic
uggaagaaacacuuuaaaggaga

SEQ ID NO: 3437 - RNA, 23 nt, Artificial
  Synthetic
ugggaagaaacacuuuaaaggag

SEQ ID NO: 3438 - RNA, 23 nt, Artificial
  Synthetic
uaagggaagaaacacuuuaaagg

SEQ ID NO: 3439 - DNA, 23 bp, Artificial
  Synthetic
utautaagggaagaaacacuuua

SEQ ID NO: 3440 - DNA, 23 bp, Artificial
  Synthetic
uauatuaagggaagaaacacuuu

SEQ ID NO: 3441 - DNA, 23 bp, Artificial
  Synthetic
uaauautaagggaagaaacacuu

SEQ ID NO: 3442 - DNA, 23 bp, Artificial
  Synthetic
utaaauauuaagggaagaaacac

SEQ ID NO: 3443 - RNA, 23 nt, Artificial
  Synthetic
ugauaaauauuaagggaagaaac

SEQ ID NO: 3444 - DNA, 23 bp, Artificial
  Synthetic
ucagauaaauatuaagggaagaa

SEQ ID NO: 3445 - DNA, 23 bp, Artificial
  Synthetic
uauaactugggagaauguaaguc

SEQ ID NO: 3446 - RNA, 23 nt, Artificial
  Synthetic
uaauaacuugggagaauguaagu

SEQ ID NO: 3447 - DNA, 23 bp, Artificial
  Synthetic
ugaataacuugggagaauguaag

SEQ ID NO: 3448 - DNA, 23 bp, Artificial
  Synthetic
utgaauaacuugggagaauguaa

SEQ ID NO: 3449 - DNA, 23 bp, Artificial
  Synthetic
ucugaataacutgggagaaugua

SEQ ID NO: 3450 - DNA, 23 bp, Artificial
  Synthetic
ugcugaauaactugggagaaugu

SEQ ID NO: 3451 - DNA, 23 bp, Artificial
  Synthetic
ucauaugaggctgaauaacuugg

SEQ ID NO: 3452 - DNA, 23 bp, Artificial
  Synthetic
utcatatgaggcugaauaacuug

SEQ ID NO: 3453 - RNA, 23 nt, Artificial
  Synthetic
ugucauaugaggcugaauaacuu

SEQ ID NO: 3454 - DNA, 23 bp, Artificial
  Synthetic
ucaaagtgcactcugaacuguuu

SEQ ID NO: 3455 - RNA, 23 nt, Artificial
  Synthetic
uccaaagugcacucugaacuguu

SEQ ID NO: 3456 - DNA, 23 bp, Artificial
  Synthetic
utgccaaagugcacucugaacug

SEQ ID NO: 3457 - DNA, 23 bp, Artificial
  Synthetic
ucaatugugugccaaagugcacu

SEQ ID NO: 3458 - DNA, 23 bp, Artificial
  Synthetic
uacacatuagatuguucuguucc

SEQ ID NO: 3459 - RNA, 23 nt, Artificial
  Synthetic
ucacacauuagauuguucuguuc

SEQ ID NO: 3460 - RNA, 23 nt, Artificial
  Synthetic
uccacacauuagauuguucuguu

SEQ ID NO: 3461 - RNA, 23 nt, Artificial
  Synthetic
uaccacacauuagauuguucugu

SEQ ID NO: 3462 - RNA, 23 nt, Artificial
  Synthetic
ucaaaccacacauuagauuguuc

SEQ ID NO: 3463 - RNA, 23 nt, Artificial
  Synthetic
uccaaaccacacauuagauuguu

SEQ ID NO: 3464 - RNA, 23 nt, Artificial
  Synthetic
uaccaaaccacacauuagauugu

SEQ ID NO: 3465 - DNA, 23 bp, Artificial
  Synthetic
utaccaaaccacacauuagauug

SEQ ID NO: 3466 - RNA, 23 nt, Artificial
  Synthetic
uauaccaaaccacacauuagauu

SEQ ID NO: 3467 - DNA, 23 bp, Artificial
  Synthetic
ugaataccaaaccacacauuaga

SEQ ID NO: 3468 - RNA, 23 nt, Artificial
  Synthetic
uggaauaccaaaccacacauuag

SEQ ID NO: 3469 - DNA, 23 bp, Artificial
  Synthetic
utggaataccaaaccacacauua

SEQ ID NO: 3470 - RNA, 23 nt, Artificial
  Synthetic
ucuuggaauaccaaaccacacau

SEQ ID NO: 3471 - DNA, 23 bp, Artificial
  Synthetic
uugaautccuuuacaccacacug

SEQ ID NO: 3472 - RNA, 23 nt, Artificial
  Synthetic
uaaugaauuccuuuacaccacac

SEQ ID NO: 3473 - DNA, 23 bp, Artificial
  Synthetic
uucatgaauacauccauggcuaa

SEQ ID NO: 3474 - DNA, 23 bp, Artificial
  Synthetic
uucctutcaugaauacauccaug

SEQ ID NO: 3475 - RNA, 23 nt, Artificial
  Synthetic
uuugaaaguccuuucaugaauac

SEQ ID NO: 3476 - DNA, 23 bp, Artificial
  Synthetic
ugcctutgaaaguccuuucauga

SEQ ID NO: 3477 - DNA, 23 bp, Artificial
  Synthetic
uggccutugaaaguccuuucaug

SEQ ID NO: 3478 - RNA, 23 nt, Artificial
  Synthetic
uagccuacauagagaacacccuc

SEQ ID NO: 3479 - DNA, 23 bp, Artificial
  Synthetic
ugcucutuggucuucucagccac

SEQ ID NO: 3480 - DNA, 23 bp, Artificial
  Synthetic
uucacutgcucuuuggucuucuc

SEQ ID NO: 3481 - DNA, 23 bp, Artificial
  Synthetic
uucataagccucauugucaggau

SEQ ID NO: 3482 - DNA, 23 bp, Artificial
  Synthetic
ugcatutcauaagccucauuguc

SEQ ID NO: 3483 - DNA, 23 bp, Artificial
  Synthetic
uggcautucauaagccucauugu

SEQ ID NO: 3484 - DNA, 23 bp, Artificial
  Synthetic
ucuucctcagaaggcauuucaua

SEQ ID NO: 3485 - RNA, 23 nt, Artificial
  Synthetic
uuucguagucuugauacccuucc

SEQ ID NO: 3486 - DNA, 23 bp, Artificial
  Synthetic
uguucgtagucuugauacccuuc

SEQ ID NO: 3487 - DNA, 23 bp, Artificial
  Synthetic
uauatutcuuaggcuucagguuc

SEQ ID NO: 3488 - DNA, 23 bp, Artificial
  Synthetic
uagatatuucuuaggcuucaggu

SEQ ID NO: 3489 - DNA, 23 bp, Artificial
  Synthetic
uaaagatauuucuuaggcuucag

SEQ ID NO: 3490 - RNA, 23 nt, Artificial
  Synthetic
uggagcaaagauauuucuuaggc

SEQ ID NO: 3491 - DNA, 23 bp, Artificial
  Synthetic
ugaaactgggagcaaagauauuu

SEQ ID NO: 3492 - RNA, 23 nt, Artificial
  Synthetic
uucucaagaaacugggagcaaag

SEQ ID NO: 3493 - DNA, 23 bp, Artificial
  Synthetic
uauctcaagaaacugggagcaaa

SEQ ID NO: 3494 - DNA, 23 bp, Artificial
  Synthetic
uggaactgagcacuuguacagga

SEQ ID NO: 3495 - RNA, 23 nt, Artificial
  Synthetic
uuuggaacugagcacuuguacag

SEQ ID NO: 3496 - RNA, 23 nt, Artificial
  Synthetic
uuugagaaaugucaugacugggc

SEQ ID NO: 3497 - DNA, 23 bp, Artificial
  Synthetic
ucaatcacugcugauggaagacu

SEQ ID NO: 3498 - DNA, 23 bp, Artificial
  Synthetic
uuucaatcacugcugauggaaga

SEQ ID NO: 3499 - DNA, 23 bp, Artificial
  Synthetic
uacutcaaucacugcugauggaa

SEQ ID NO: 3500 - DNA, 23 bp, Artificial
  Synthetic
uauacutcaaucacugcugaugg

SEQ ID NO: 3501 - DNA, 23 bp, Artificial
  Synthetic
uacagatacuucaaucacugcug

SEQ ID NO: 3502 - DNA, 23 bp, Artificial
  Synthetic
uucacutcagugaaagggaagca

SEQ ID NO: 3503 - RNA, 23 nt, Artificial
  Synthetic
ucauguauucacuucagugaaag

SEQ ID NO: 3504 - DNA, 23 bp, Artificial
  Synthetic
uccatgtauucacuucagugaaa

SEQ ID NO: 3505 - DNA, 23 bp, Artificial
  Synthetic
uuaccatguauucacuucaguga

SEQ ID NO: 3506 - DNA, 23 bp, Artificial
  Synthetic
ugautuagaaauaagugguaguc

SEQ ID NO: 3507 - DNA, 23 bp, Artificial
  Synthetic
uggatutagaaauaagugguagu

SEQ ID NO: 3508 - DNA, 23 bp, Artificial
  Synthetic
ugaggatuuagaaauaaguggua

SEQ ID NO: 3509 - RNA, 23 nt, Artificial
  Synthetic
uauagcaaaucacuaacaacuuc

SEQ ID NO: 3510 - DNA, 23 bp, Artificial
  Synthetic
uucatuauucuuagacaguauca

SEQ ID NO: 3511 - DNA, 23 bp, Artificial
  Synthetic
uauagutucaugcucacauauuu

SEQ ID NO: 3512 - DNA, 23 bp, Artificial
  Synthetic
ucauagtuucaugcucacauauu

SEQ ID NO: 3513 - RNA, 23 nt, Artificial
  Synthetic
uugcauaguuucaugcucacaua

SEQ ID NO: 3514 - DNA, 23 bp, Artificial
  Synthetic
uguatutauaggugcauaguuuc

SEQ ID NO: 3515 - DNA, 23 bp, Artificial
  Synthetic
uuagtatuuauaggugcauaguu

SEQ ID NO: 3516 - RNA, 23 nt, Artificial
  Synthetic
uucaccauuuauauacaaacaca

SEQ ID NO: 3517 - DNA, 23 bp, Artificial
  Synthetic
uuautatuaaagugagaugggau

SEQ ID NO: 3518 - DNA, 23 bp, Artificial
  Synthetic
uagccutgaaugugcuaauaugu

SEQ ID NO: 3519 - DNA, 23 bp, Artificial
  Synthetic
uauatutggcaacauuuaaagga

SEQ ID NO: 3520 - RNA, 23 nt, Artificial
  Synthetic
uauccuagaauucauauauuugg

SEQ ID NO: 3521 - RNA, 23 nt, Artificial
  Synthetic
uaauagaucuucccugaaagaga

SEQ ID NO: 3522 - RNA, 23 nt, Artificial
  Synthetic
ucuagcaugucuagaauauucug

SEQ ID NO: 3523 - RNA, 23 nt, Artificial
  Synthetic
ucugcuagcaugucuagaauauu

SEQ ID NO: 3524 - DNA, 23 bp, Artificial
  Synthetic
uuaaactgcuagcaugucuagaa

SEQ ID NO: 3525 - DNA, 23 bp, Artificial
  Synthetic
uauacatauaaacugcuagcaug

SEQ ID NO: 3526 - RNA, 23 nt, Artificial
  Synthetic
uaauacauauaaacugcuagcau

SEQ ID NO: 3527 - DNA, 23 bp, Artificial
  Synthetic
uucatgaauacauauaaacugcu

SEQ ID NO: 3528 - RNA, 23 nt, Artificial
  Synthetic
uaucacauuacucaugaauacau

SEQ ID NO: 3529 - DNA, 23 bp, Artificial
  Synthetic
uauccutauagucacucauuccu

SEQ ID NO: 3530 - DNA, 23 bp, Artificial
  Synthetic
uaaccatccuuauagucacucau

SEQ ID NO: 3531 - DNA, 23 bp, Artificial
  Synthetic
uuggtaaccauccuuauagucac

SEQ ID NO: 3532 - DNA, 23 bp, Artificial
  Synthetic
uuuctatgguaaccauccuuaua

SEQ ID NO: 3533 - DNA, 23 bp, Artificial
  Synthetic
uaagtutcuaugguaaccauccu

SEQ ID NO: 3534 - DNA, 23 bp, Artificial
  Synthetic
ugaagutucuaugguaaccaucc

SEQ ID NO: 3535 - RNA, 23 nt, Artificial
  Synthetic
uaaggaaguuucuaugguaacca

SEQ ID NO: 3536 - RNA, 23 nt, Artificial
  Synthetic
uaaaggaaguuucuaugguaacc

SEQ ID NO: 3537 - DNA, 23 bp, Artificial
  Synthetic
uagctuagcacucuguaguaguc

SEQ ID NO: 3538 - RNA, 23 nt, Artificial
  Synthetic
uaugacacaugcagcuuagcacu

SEQ ID NO: 3539 - RNA, 23 nt, Artificial
  Synthetic
uaguguaagaugacacaugcagc

SEQ ID NO: 3540 - DNA, 23 bp, Artificial
  Synthetic
uaaacutaccauuucucucuagu

SEQ ID NO: 3541 - DNA, 23 bp, Artificial
  Synthetic
ugaaactuaccauuucucucuag

SEQ ID NO: 3542 - DNA, 23 bp, Artificial
  Synthetic
uucctgaaauauacuguucaaua

SEQ ID NO: 3543 - DNA, 23 bp, Artificial
  Synthetic
uaaccutccugaaauauacuguu

SEQ ID NO: 3544 - DNA, 23 bp, Artificial
  Synthetic
uauucatggucacaacuuuccua

SEQ ID NO: 3545 - DNA, 23 bp, Artificial
  Synthetic
ugaatutguauccacauaaaucc

SEQ ID NO: 3546 - RNA, 23 nt, Artificial
  Synthetic
uggagaauuuguauccacauaaa

SEQ ID NO: 3547 - DNA, 23 bp, Artificial
  Synthetic
uaacactuuaaaggagaauuugu

SEQ ID NO: 3548 - RNA, 23 nt, Artificial
  Synthetic
ugaaacacuuuaaaggagaauuu

SEQ ID NO: 3549 - RNA, 23 nt, Artificial
  Synthetic
uggaagaaacacuuuaaaggaga

SEQ ID NO: 3550 - RNA, 23 nt, Artificial
  Synthetic
uagggaagaaacacuuuaaagga

SEQ ID NO: 3551 - RNA, 23 nt, Artificial
  Synthetic
uaagggaagaaacacuuuaaagg

SEQ ID NO: 3552 - DNA, 23 bp, Artificial
  Synthetic
uauaactugggagaauguaaguc

SEQ ID NO: 3553 - RNA, 23 nt, Artificial
  Synthetic
ugcugaauaacuugggagaaugu

SEQ ID NO: 3554 - DNA, 23 bp, Artificial
  Synthetic
uagucataugaggcugaauaacu

SEQ ID NO: 3555 - RNA, 23 nt, Artificial
  Synthetic
uaccacacauuagauuguucugu

SEQ ID NO: 3556 - RNA, 23 nt, Artificial
  Synthetic
uaaaccacacauuagauuguucu

SEQ ID NO: 3557 - RNA, 23 nt, Artificial
  Synthetic
uggaauaccaaaccacacauuag

SEQ ID NO: 3558 - DNA, 23 bp, Artificial
  Synthetic
uuggaataccaaaccacacauua

SEQ ID NO: 3559 - RNA, 23 nt, Artificial
  Synthetic
ucuuggaauaccaaaccacacau

SEQ ID NO: 3560 - RNA, 23 nt, Artificial
  Synthetic
uacacugucgucgaauggccacu

SEQ ID NO: 3561 - DNA, 23 bp, Artificial
  Synthetic
ucuutacaccacacugucgucga

SEQ ID NO: 3562 - RNA, 23 nt, Artificial
  Synthetic
uuucaugaauacauccauggcua

SEQ ID NO: 3563 - DNA, 23 bp, Artificial
  Synthetic
uccutucaugaauacauccaugg

SEQ ID NO: 3564 - DNA, 23 bp, Artificial
  Synthetic
ugcctacauagagaacacccucu

SEQ ID NO: 3565 - DNA, 23 bp, Artificial
  Synthetic
ucautugucacuugcucuuuggu

SEQ ID NO: 3566 - RNA, 23 nt, Artificial
  Synthetic
uuccaacauuugucacuugcucu

SEQ ID NO: 3567 - DNA, 23 bp, Artificial
  Synthetic
ucautucauaagccucauuguca

SEQ ID NO: 3568 - RNA, 23 nt, Artificial
  Synthetic
ucagcagaucucaagaaacuggg

SEQ ID NO: 3569 - RNA, 23 nt, Artificial
  Synthetic
uuggaacugagcacuuguacagg

SEQ ID NO: 3570 - DNA, 23 bp, Artificial
  Synthetic
uacatuggaacugagcacuugua

SEQ ID NO: 3571 - DNA, 23 bp, Artificial
  Synthetic
uacutugagaaaugucaugacug

SEQ ID NO: 3572 - RNA, 23 nt, Artificial
  Synthetic
ucugcugauggaagacuucgaga

SEQ ID NO: 3573 - DNA, 23 bp, Artificial
  Synthetic
uagatacuucaaucacugcugau

SEQ ID NO: 3574 - DNA, 23 bp, Artificial
  Synthetic
ucactucagugaaagggaagcac

SEQ ID NO: 3575 - RNA, 23 nt, Artificial
  Synthetic
uaccauguauucacuucagugaa

SEQ ID NO: 3576 - RNA, 23 nt, Artificial
  Synthetic
ugcuaccauguauucacuucagu

SEQ ID NO: 3577 - RNA, 23 nt, Artificial
  Synthetic
uaauaagugguagucacuuaggu

SEQ ID NO: 3578 - DNA, 23 bp, Artificial
  Synthetic
uauutagaaauaagugguaguca

SEQ ID NO: 3579 - DNA, 23 bp, Artificial
  Synthetic
ugcataguuucaugcucacauau

SEQ ID NO: 3580 - RNA, 23 nt, Artificial
  Synthetic
uaaacacacuucuggcaguguug

SEQ ID NO: 3581 - DNA, 23 bp, Artificial
  Synthetic
uucctagaauucauauauuuggc

SEQ ID NO: 3582 - DNA, 23 bp, Artificial
  Synthetic
uuuatacuuucuacuagugacuu

SEQ ID NO: 3583 - DNA, 23 bp, Artificial
  Synthetic
uguctagaauauucugucuugaa

SEQ ID NO: 3584 - DNA, 23 bp, Artificial
  Synthetic
ugaatacauauaaacugcuagca

SEQ ID NO: 3585 - RNA, 23 nt, Artificial
  Synthetic
ugguaaccauccuuauagucacu

SEQ ID NO: 3586 - RNA, 23 nt, Artificial
  Synthetic
uaggaaguuucuaugguaaccau

SEQ ID NO: 3587 - RNA, 23 nt, Artificial
  Synthetic
uaagaugacacaugcagcuuagc

SEQ ID NO: 3588 - RNA, 23 nt, Artificial
  Synthetic
uuguaagaugacacaugcagcuu

SEQ ID NO: 3589 - DNA, 23 bp, Artificial
  Synthetic
uacctuccugaaauauacuguuc

SEQ ID NO: 3590 - RNA, 23 nt, Artificial
  Synthetic
uaauaugcugcuuuagguagauu

SEQ ID NO: 3591 - RNA, 23 nt, Artificial
  Synthetic
uaaggagaauuuguauccacaua

SEQ ID NO: 3592 - RNA, 23 nt, Artificial
  Synthetic
uuuaaaggagaauuuguauccac

SEQ ID NO: 3593 - RNA, 23 nt, Artificial
  Synthetic
uaaacacuuuaaaggagaauuug

SEQ ID NO: 3594 - RNA, 23 nt, Artificial
  Synthetic
uagaaacacuuuaaaggagaauu

SEQ ID NO: 3595 - RNA, 23 nt, Artificial
  Synthetic
uauuaagggaagaaacacuuuaa

SEQ ID NO: 3596 - DNA, 23 bp, Artificial
  Synthetic
ucaatugugugccaaagugcacu

SEQ ID NO: 3597 - RNA, 23 nt, Artificial
  Synthetic
uaaccacacauuagauuguucug

SEQ ID NO: 3598 - RNA, 23 nt, Artificial
  Synthetic
uaauaccaaaccacacauuagau

SEQ ID NO: 3599 - DNA, 23 bp, Artificial
  Synthetic
ugaataccaaaccacacauuaga

SEQ ID NO: 3600 - DNA, 1493 bp, Canis lupus
tgtgctaatatgttttattaatatttgaagcagacatagtcaaaataatttcttaaactcactattccatggaacccgtttttttttttttccatataacctcttaagacaccactgcatgtcaggatactttgggtagtgttgcttcagtgaatttccagagtaaaggattaatgttccatcttgtctgcttaattcttctaaaattccttctccttcaaatggctgtcaagagctttaagttaattgtgtcagttctcagttcatattgttataagcatgattttattattaaagtgagatgggattaaaaataagatttttgtaatgagataacattttaattttcagcatttatatataaacacaaattaataaaacacatcacaaaacagtaaaatttcatagttaatatttataggtgcatagtttcatgctaacatgtttctaagtattgtatatattaacaaatttcacaacacatcattattttttaaacagaaataatcattaaaagacacctagaaatcttataatatatgatagtaaatcacaacttctcaataacagcaacaaaaaaatagtgaagatttagaaataagtggtagtcacttaggtgctttaatttaacattttagatttgaagccacaatatccacacagcacacaagggaggaccctgctaccatataatcacttcagtgagagggaagcactgaaatgctgagtaggggctggtacagataacttcaatcactgctgatggaagagtttaaaatacactgtaaaaattttgagaaaatgttatgactgggcattttggaactgagtacttgtacaggatggaacatctgtcagtaggtctcaagaaactgggagcaaaagtatttcttaggcttcgggttcatagtcttgatacccttcctcagaaggcatttcatatgcctcattgtcaggatcaacaggcatatcttccagaattccttcctgtgggcctccttcttcactcttgcccaactgatcctttttgccaaagccagtagcagctgcgatgctccctgctccctccactgtcttttgtgctactgctgtcacccctgtcaccacggcctcaccaacatttgtcacttgctctttggtcttctcagccactgttgtcacaccatgaaccactccttccttggttttggagcctacatagaggacaccctcttttgtctttcctgctgcttctgccacaccctgtttggttttttcagcagcagccacgactccctccttggcctttgaaagtcctttcatgaatacatccatggctaatgaattcgttcacaccacactcacccccacgctgccgcgctcggtctctcaccccctctctcgggtcccctgcaagtcgtcgtggtcttcctccccttcctctttctcctccttctcctcggctcaccgcccccgcagctgatttgtcagcgcctctccccgcccctctgccg

SEQ ID NO: 3601 - RNA, 23 nt, Artificial
  synthetic
aaugaggcuuaugaaaugccuuc

SEQ ID NO: 3602 - RNA, 23 nt, Artificial
  synthetic
ccuguacaagugcucaguuccaa

SEQ ID NO: 3603 - RNA, 23 nt, Artificial
  synthetic
cuguacaagugcucaguuccaau

SEQ ID NO: 3604 - RNA, 23 nt, Artificial
  synthetic
ucgaagucuuccaucagcaguga

SEQ ID NO: 3605 - RNA, 23 nt, Artificial
  synthetic
cgaagucuuccaucagcagugau

SEQ ID NO: 3606 - RNA, 23 nt, Artificial
  synthetic
auuaaaaacaccuaagugacuac

SEQ ID NO: 3607 - RNA, 23 nt, Artificial
  synthetic
ccuguacaagugcucaguuccaa

SEQ ID NO: 3608 - RNA, 23 nt, Artificial
  synthetic
cuguacaagugcucaguuccaau

SEQ ID NO: 3609 - RNA, 23 nt, Artificial
  synthetic
ucgaagucuuccaucagcaguga

SEQ ID NO: 3610 - RNA, 23 nt, Artificial
  synthetic
cgaagucuuccaucagcagugau

SEQ ID NO: 3611 - RNA, 23 nt, Artificial
  synthetic
auuaaaaacaccuaagugacuac
